United States Patent Application Publication US 2019/0002960 A1 - sequence listing, part 8

SEQ ID NO: 8 - DNA, 2782313 bp, Staphylococcus aureus 08BA02176 (residues 1-1,391,157 of 2,782,313)
tcgattaaagatagaaatacacgatgcgagcaatcaatcttcataacatcaccatgattttggtccgaagcatgagtgtttacaatgtttgaataccttatacaattcttatacatactttataaattatttcccaagctgttttgatacacacaccaacagatactctatagaaggaaaagttatccacttatgcacatttatagtttttagaattgtggataattagaaattacacacaaagttatactatttttagcaacatattcacaggtatttgacatatagagaactgaaaaagtataattgtgtggataagtcgtccaactcatgattttataaggatttatttattgatatttacataaaaatactgtgcataactactaagcaggataaagttatccaccgattgttattaacttgtggataattattaacatggtgtgtttagaagttatccacggctgttatttttgtgtataacttaaaaatttaagaaagatggagtaaatttatgtcggaaaaagaaatttgggaaaaagtacttgaaattgctcaagaaaaattatcagctgtaagttactcaactttcctaaaagatactgagctttacacgattaaagatggtgaagctatcgtattatcgagtattccttttaatgcaaattggttaaatcaacaatatgctgaaattatccaagcaatcttatttgatgttgtaggctatgaagtaaaacctcactttattactactgaagaattagcaaattatagtaataatgaaactgctacttcaaaagaaacaacaaaaccttctactgaaacaactgaggataatcatgtgcttggtagagagcaattcaatgcccataacacatttgacacttttgtaatcggacctggtaaccgctttccacatgcagcgagtttagctgtggccgaagcaccagccaaagcgtacaatccattatttatctatggaggtgttggtttaggaaaaacccatttaatgcatgccattggtcatcatgttttagataataatccagatgccaaagtgatttacacatcaagtgaaaaattcacaaatgaatttattaaatcaattcgtgataacgaaggtgaagctttcagagaaagatatcgtaatatcgacgtcttattaatcgatgatattcagttcatacaaaataaagtacaaacacaagaagaatttttctatacttttaatgaattgcatcagaataacaagcaaatagttatttcgagtgatcgaccaccaaaggaaattgcacaattagaagatcgattacgttcgcgctttgaatgggggctaattgttgatattacgccaccagattatgaaactcgaatggcaattttgcagaagaaaattgaagaagaaaaattagatattccaccagaagctttaaattatatagcaaatcaaattcaatctaatattcgtgaattagaaggtgcattaacgcgtttacttgcatattcacaattattaggaaaaccaattacaactgaattaactgctgaagctttaaaagatatcattcaagcaccaaaatctaaaaagattaccatccaagatattcaaaaaattgtaggccagtactataatgttagaattgaagatttcagtgcaaaaaaacgtacaaagtcaattgcatatccacgtcaaatagctatgtacttgtctagagagcttacagatttctcattacctaaaattggtgaagaatttggtgggcgtgatcatacgaccgtcattcatgctcatgaaaaaatatctaaagatttaaaagaagatcctatttttaaacaagaagtagagaatcttgaaaaagaaataagaaatgtataagtaggaaacttcgggaaatgtaatctgttatataacagcactaataataacaatcattttttacatttctatatgctaatgtggcaagatgagcaaaactcattttgtggataatgtttaaaagtcatacataccatacacaagttatcaacatgtgtataacttcgccaaatctatgtttttaagacttatccaccaatccacagcacctactactattactaagaacttaaaacctatataattatatataaacgactggaaggagttttaattaatgatggaattcactattaaaagagattattttattacacaattaaatgacacattaaaagctatttcaccaagaacaacattacctatattaactggtatcaaaatcgatgcaaaagaacatgaagttatattaactggttcagactctgaaatttcaatagaaatcactattcctaaaactgtagatggcgaagatattgtcaatatttcagaaacagggtcagtagtacttcctggacgattctttgttgatattataaaaaaattacctggtaaagatgttaaattatctacaaatgaacaattccagacattaattacatcaggtcattctgaatttaatttaagtggcttagatccagatcaatatcctttattacctcaagtttctagagatgacgcaattcaattgtcggtaaaagtgcttaaaaacgtaattgcacaaacgaattttgcagtgtccacctcagaaacacgcccagtactaactggtgtgaactggcttatacaagaaaacgaattaatatgcacagcgactgactcacaccgcttggctgtaagaaagttgcagttagaagatgtttctgaaaacaaaaatgtcatcattccaggtaaggctttagctgaattaaataaaattatgtctgacaatgaagaagacattgatatcttctttgcttcaaaccaagttttatttaaagtcggaaatgtaaactttatttctcgattattagaaggacattatcctgatacaacacgtttattccctgaaaactatgaaattaaattaagtatagacaatggggagttttatcatgcgattgatcgtgcatctttattagcacgtgaaggtggtaataacgttattaaattaagtacaggtgatgacgttgttgaattgtcttctacatcaccagaaattggtactgtaaaagaagaagttgatgcaaacgatgttgaaggtggtagcctgaaaatttcattcaactctaaatatatgatggatgctttaaaagcaatcgataatgatgaggttgaagttgaattcttcggtacaatgaaaccatttattctaaaaccaaaaggtgacgactcggtaacgcaattaattttaccaatcagaacttactaaaaataaatataaataaaggatgacgtgattaattaaaacgtcatcctttattttttggcaaaaataattctagattcgtatgtaaaataaatttgacagcattttaaacagcaaataaaagacgccaattaaatttatgacaaatgtatccagaatttaataagtgtgcttatatgccctttaaatttaaaattttaatagtcaataacaagttgaatataaaagttaaacgccgttaaatagcgtttaaaaaatgaaaatgacagtattgccaaaaaataagaattaattattcatatgtaaacggtttctacctctattttaaatgaaatttgtgacaaaaaaaggtataatatattaatgacatacaaagaaatggagtgattattttggttcaagaagttgtagtagaaggagacattaatttaggtcaatttctaaaaacagaagggattattgaatctggtggtcaagcaaaatggttcttgcaagacgttgaagtattaattaatggagtgcgtgaaacacgtcgcggtaaaaagttagaacatcaagatcgtatagatatcccagaattacctgaagatgctggttctttcttaatcattcatcaaggtgaacaatgaagttaaatacactccaattagaaaattatcgtaactatgatgaggttacgttgaaatgtcatcctgacgtgaatatcctcattggagaaaatgcacaaggaaagacaaatttacttgaatcaatttataccttagctttagcaaaaagtcatagaacgagtaatgataaggaactcatacgttttaatgctgattatgctaaaatagaaggtgagcttagttatagacacggcacgatgccattaacaatgtttataactaaaaaaggtaaacaagtcaaagtgaatcacttagagcaaagtcgtctaactcaatatattggacacctcaatgtggttctatttgcgccagaagatttgaatattgtaaaaggctctcctcaaataagacgacgctttatagatatggagttgggccaaatttctgctgtttacttaaatgatttagctcaataccaacgtattttaaagcaaaagaataattacttaaagcagttacaattaggccaaaaaaaggacttaacaatgttggaagtattaaatcagcagtttgctgaatatgcaatgaaagtaactgataaacgtgcacattttattcaagagctagagtcgttagctaaaccgattcatgctggtatcacaaatgataaagaaacgttgtcgctgaattatttacctagtcttaaatttgattatgctcaaaatgaagcggcacgacttgaagaaattatgtctattcttagcgataatatgcaaagagaaaaagaacgaggcattagcttattcggaccacatcgagatgatataagttttgatgtgaatggcatggatgctcaaacatatggttctcaaggacagcaacgtacaacggctttgtccattaaattagctgaaattgagttaatgaatatcgaagttggggaatatcctatcttattattagacgatgtactcagtgaattagatgattcgcgtcaaacgcatttattaagtacgattcagcataaagtacaaacatttgtcactacgacatctatagatggtattgatcatgaaatcatgaataacgctaaattgtatcgtattaatcaaggtgaaattataaagtaacagaaagcgatggtgactgcattgtcagatgtaaacaacacggataattatggtgctgggcaaatacaagtattagaaggtttagaagcagtacgtaaaagaccaggtatgtatataggatcgacttcagagagaggtttgcaccatttagtgtgggaaattgtcgataatagtatcgatgaagcattagctggttatgcaaatcaaattgaagttgttattgaaaaagataactggattaaagtaacggataacggacgtggtatcccagttgatattcaagaaaaaatgggacgtccagctgtcgaagttattttaactgttttacatgctggtggtaaatttggcggtggcggatacaaagtatctggtggtttacatggtgttggttcatcagttgtaaacgcattgtcacaagacttagaagtatatgtacacagaaatgagactatatatcatcaagcatataaaaaaggtgtacctcaatttgacttaaaagaagttggcacaactgataagacaggtactgtcattcgttttaaagcagatggagatatcttcacagagacaactgtatacaactatgaaacgttacaacaacgtattagagagcttgctttcttaaacaaaggaatacaaatcacattaagagatgaacgtgatgaagaaaacgttagagaagactcctatcactatgagggcggtattaaatcttatgttgagttattgaacgaaaataaagaacctattcatgatgagccaatttatattcatcaatctaaagatgatattgaagtagaaattgcgattcaatataactcaggatatgccacaaatcttttaacttacgcaaataacattcatacgtatgaaggtggtacgcatgaagacggattcaaacgtgcattaacgcgtgtcttaaatagttatggtttaagtagcaagattatgaaagaagaaaaagatagactttctggtgaagatacacgtgaaggtatgacagcaattatatctatcaaacatggtgatcctcaattcgaaggtcaaacgaagacaaaattaggtaattctgaagtgcgtcaagttgtagataaattattctcagagcactttgaacgatttttatatgaaaatccacaagtcgcacgtacagtggttgaaaaaggtattatggcggcacgtgcacgtgttgctgcgaaaaaagcgcgtgaagtaacacgtcgtaaatcagcattagatgtagcaagtcttccaggtaaattagccgattgctctagtaaaagtcctgaagaatgtgagattttcttagtcgaaggggactctgctggggggtctacaaaatctggtcgtgactctagaacgcaggcgattttaccattacgaggtaagatattaaatgttgaaaaagcacgattagatagaattttgaataacaatgaaattcgtcaaatgatcacagcatttggtacaggaatcggtggcgactttgatctagcgaaagcaagatatcacaaaatcgtcattatgactgatgccgatgtggatggagcgcatattagaacattgttattaacattcttctatcgatttatgagaccgttaattgaagcaggctatgtgtatattgcacagccaccgttgtataaactgacacaaggtaaacaaaagtattatgtatacaatgatagggaacttgataaacttaaatctgaattgaatccaacaccaaaatggtctattgcacgatacaaaggtcttggagaaatgaatgcagatcaattatgggaaacaacaatgaaccctgagcaccgcgctcttttacaagtaaaacttgaagatgcgattgaagcggaccaaacatttgaaatgttaatgggtgacgttgtagaaaaccgtagacaatttatagaagataatgcagtttatgcaaacttagacttctaagcgctgtgaactgaacttttgaaggaggaactcttgatggctgaattacctcaatcaagaataaatgaacgaaatattaccagtgaaatgcgtgaatcatttttagattatgcgatgagtgttatcgttgctcgtgcattgccagatgttcgtgacggtttaaaaccagtacatcgtcgtatactatatggattaaatgaacaaggtatgacaccggataaatcatataaaaaatcagcacgtatcgttggtgacgtaatgggtaaatatcaccctcatggtgactcatctatttatgaagcaatggtacgtatggctcaagatttcagttatcgttatccgcttgttgatggccaaggtaactttggttcaatggatggagatggcgcagcagcaatgcgttatactgaagcgcgtatgactaaaatcacacttgaactgttacgtgatattaataaagatacaatagattttatcgataactatgatggtaatgaaagagagccgtcagtcttacctgctcgattccctaacttgttagccaatggtgcatcaggcatcgcggtaggtatggcaacgaatattccaccacataacttaacagaattaatcaatggtgtacttagcttaagtaagaaccctgatatttcaattgctgagttaatggaagatattgaaggtcctgatttcccaactgctggacttattttaggtaagagtggtattagacgcgcatatgaaacaggtcgtggttcaattcaaatgcgttctcgtgcagttattgaagaacgtggaggcggacgtcaacgtattgttgtcactgaaattcctttccaagtgaataaggctcgtatgattgaaaaaattgcagagctcgttcgtgacaagaaaattgacggtatcactgatttacgtgatgaaacaagtttacgtactggtgtgcgtgtcgttattgatgtgcgtaaggatgcaaatgctagtgtcattttaaataacttatacaaacaaacacctcttcaaacatcatttggtgtgaatatgattgcacttgtaaatggtagaccgaagcttattaatttaaaagaagcgttggtacattatttagagcatcaaaagacagttgttagaagacgtacgcaatataacctacgtaaagctaaagatcgtgcccacattttagaagggttacgtatcgcacttgaccatatcgatgaaattatttcaacgattcgtgagtcagatacagataaagttgcgatggaaagcttgcaacaacgcttcaaactttctgaaaaacaagctcaagctattttagacatgcgtttaagacgtctaacaggtttagagagagacaaaattgaagctgaatataatgagttattaaattatattagtgaattagaagcaatcttagctgatgaagaagtgttattacagttagttagagatgaattgactgaaattagagatcgtttcggtgatgatcgtcgtacagaaattcaattaggtggatttgaagacttagaggacgaagacttaattccagaagaacaaatagtaattactttgagccataataactacattaaacgtttgccggtatctacatatcgtgctcaaaaccgtggtggtcgtggtgttcaaggtatgaatacattggaagaagattttgtcagtcaattggtaactttaagtacacatgaccatgtattgttctttactaacaaaggtcgtgtatacaaactaaaaggttatgaagtgcctgagttatcaagacagtctaaaggtattcctgtagtgaatgctattgaacttgaaaatgatgaagtcattagtacaatgattgctgttaaagaccttgaaagtgaagacaacttcttagtgtttgcaactaaacgtggtgtcgttaaacgttcagcattaagtaacttctcaagaataaatagaaatggtaagattgcgatttcgttcagagaagatgatgagttaattgcagttcgcttaacaagtggtcaagaagatatcttgattggtacatcacatgcatcattaattcgattccctgaatcaacattacgtcctttaggccgtacagctacgggtgtgaaaggtattacacttcgtgaaggtgacgaagttgtagggcttgatgtagctcatgcaaacagtgttgatgaagtattagtagttactgaaaatggttatggtaaacgtacgccagttaatgactatcgtttatcaaatcgtggtggtaaaggtattaaaacagctacgattactgagcgtaatggtaatgttgtatgtatcactacagtaactggtgaagaagatttaatgattgttactaatgtcggtgtcattattcgactagatgttgcagatatttctcaaaatggtcgtgcagcacaaggtgttcgcttaattcgcttaggcgatgatcaatttgtttcaacggttgctaaagtaaaagaggatgcagacgatgaaacgaatgaagatgagcaatctacttcaactgtatctgaagatggtactgaacaacaacgtgaagcggttgtaaatgatgaaacaccaggaaatgcaattcatactgaagtgattgattcagaagaaaatgatgaagatggacgtattgaagtaagacaagatttcatggatcgtgttgaagaagatatacaacaatcatcagatgaagatgaagaataaaaaaataagacttccctatatgtaggggagtcttatttttatgctagaaagtaatgctgtactatattcaatgagtagtaatgactaactttctaattgtttcattgcataaggtatttcattgataagtcttgatggtggcaccacatacatatcttttgcaagattttcgccaataaaactatgtgtatatgtggcactcataactgcttcttttaagttatcaaattgaccaacaaaacttgtaatcataccagcaagtgtatcgcccataccaccagtcgccattgctgggctaccgattgtcaatttaaagtcttcatctttaaagaaaatttcagtaccgtgttttttaagtacaacagttgcgcctaaacgatcaactgcttcacgattacgctcatatgtctgttcctcaataggaataccacttaatcgttcccattctttgaggtgcggtgtaaagatcacacgacatgtaggtaattgcggtttcagtttactaaatattgtaatcgcatcgccgtctacgattaaattttgatgcggttgtatattttgtagtaggaatgtaatggcattatttcctttgaaatcaacgccaagacctggaccaattagtatactgtcagtcatttcaatcattttcgtcaacattttcgtatcattaatatcaataaccatcgcttctgggcaacgagaatgtaatgctgaatgatttgttggatgtgtagctacagtgattaaaccactaccgctaaatacacatgcacgagccgctaacataatggcaccacctaagttagcagatccaccaattaataaaattttgccataatcacctttatgtgaatcttctttacgcttaggaatgttaatagaatttaacgtttccatagtgatataacctcccatataaaagccttttccgaatttattcaattttaaaaatatatagtaactcttaacaaaatgtattataaatttctgaattcattattatttgtcgttaaatacaatagaaaatactatacctgtatatgcaattcgtcaatagataaattattaaatatgcttacaacaatcttaatatcctttaatgcactacaatagtgctctgataataggttataaatgtacgtaaaaccattgtttcaataaaaatgaaaacgtatacttcaagaaggatgggttacttaatataaacaagggggtaacatatatgactttatatttagatggtgaaacactaacaattgaggatattaaatcatttttacaacaacaatcaaagattgaaattattgatgatgcgttagaacgtgtcaaaaaaagtagagcggtagttgaaggtattattgaaaatgaggaaacggtttatggtatcactacaggttttgggttatttagtgatgtacgtatagacccgacgcaatataatgaattacaagtgaatctgatacgctcacatgcctgtggactaggtgagccattttcaaaagaagtagcattagtcatgatgattttacgattgaatacattattaaaaggtcattcaggtgccactttagaattagtgagacaattacaattttttataaatgaacgtattataccgataataccgcaacaagggtcactcggtgcatcaggagatttagcaccattatcacacttagcattagcattaattggtgaagggaaagtattgcacagaggggaagaaaaggatagtgacgatgtattaagagaattaaatagacaacctttgaaccttcaggctaaagaaggtttagcattgattaatggtacgcaagctatgacagctcaaggtgtcattagttatatagaagcagaagatttaggttaccaatctgaatggattgctgcattaacgcatcagtctcttaatggcattatagatgcatatcgacatgatgtgcacgctgttcgtaattttcaagaacagattaatgtggcagcgcgtatgcgtgattggttagaaggatcaacattaacgacgcgacaagcagaaatacgtgtacaagatgcatatacgttgcgttgtataccacaaatccatggcgcgagttttcaagtattcaattatgttaaacagcaattggaatttgaaatgaatgcggctaatgataatccacttatatttgaggaagcaaatgaaacgtttgttatttcaggtggtaacttccatggacaacctattgcttttgcattagatcatcttaaattaggtgtaagtgaattagcaaacgtatcggaacgtcgtctagagcgactagtaaatcctcaattaaatggtgatttaccagcatttcttagtccagagccaggattgcaaagtggcgcgatgattatgcaatatgctgctgcaagtctcgtttctgaaaataaaactttagcgcatccagcgagtgttgattctatcacttcatctgcgaaccaagaagatcacgtatctatgggaactacagctgctagacatggttatcaaattattgaaaatgcaagacgtgtgttggcaatcgaatgtgttattgcattacaagcagcagagttgaaaggtgtcgaaggattatcaccaaaaacacgtcgcaagtatgatgagtttcgaagtatcgtgccatccattacacatgaccgtcaatttcataaagatattgaagcggttgcacagtatttaaagcaatcaatttatcaaacgactgcatgtcattaaatcgacatgattgatgtttgaaatcgttacttgaaaaagcaaatatagtttgctatattaaaaataacttaataagacattgttcgtaggacaagtaatatatagtgttcgatatcagagagcttgtggttagtgtgaacaagaatcaacatatatatgaatctacctactcatttaaaagaacaatcggtgataaccgttattttagtgaagtgcaatttaggtttagtgtatctttataacttaaattgttaaatagggtggcaacgcgtagaccacgtcccttgtagggatgtggtctttttttattttctaaaaaataaagacgtgcgtcattccataataaatgataattatttgggaaaggatgaaggttaatgttagacattagattattcagaaatgagcctgacacagttaagagcaaaattgaattacgtggagatgatccaaaagttgtagatgaaattttagaattggatgagcaacgacgtaaattgattagtgctacagaagaaatgaaagcacgtcgtaataaagtaagtgaagaaatcgcattaaaaaaacgtaataaagaaaatgctgatgatgtgattgctgaaatgcgcacattaggtgacgatattaaagaaaaagatagtcaattaaatgaaattgataataaaatgacaggtatcctttgtcgtattccaaatttaataagtgatgatgtacctcaaggtgaatctgatgaagataacgttgaagttaaaaagtggggtacaccacgtgagttttcatttgaaccaaaagcacattgggatattgtagaagaattgaaaatggctgattttgatcgtgcagcaaaagtttcaggtgcgcgttttgtatatttaacaaatgaaggtgcgcaattagagcgtgctttaatgaactatatgattacaaaacatacaacacaacatggttatacagaaatgatggtaccacagcttgtgaacgcagatacaatgtatggtacaggtcaattacctaaatttgaagaagatttatttaaagtagaaaaagaaggattatatacaattccaactgctgaagtaccattaacgaatttctatcgtaatgaaattattcaaccaggtgtacttcctgaaaaattcactggtcaatctgcatgtttccgtagtgaagcaggatcagcaggtagagatacaagaggattaattcgtttacatcaattcgataaagtggaaatggtacgttttgaacaacctgaagattcatggaatgctttagaagaaatgacaacaaacgcagaagcaattctagaagagttaggtttaccataccgtcgtgttattttatgtacaggtgatattggttttagtgcaagcaaaacatatgatttagaagtttggttaccaagctacaatgattataaagaaattagttcatgctcaaactgtacggatttccaagcgcgtcgtgctaacatccgcttcaagcgtgacaaagcagctaaaccagaattagcacatacattaaatggtagtggtttagcagttggacgtacatttgctgctattgttgaaaattaccaaaatgaagatggaacagtaacaattccagaagcattagtaccatttatgggtggtaaaacacaaatttcaaaaccagttaaataaaggctttagctacaagctttaaaaagtatatatctacgtatacttaaagcaagggcaagatactttgaattatatttaaaaagtggtgacgaagctgtcgccactttttttgtgctgtaaaagtataatagtgagccaatgcacataacaacaataaattaagtttgtggttcaatgggatgaatgcatttcattatagcaacaatacgggataattatgatgaactaaaacaatctaaaacgtaacaagtttgagcaaaactattataggaaattaagcgataaaaactgatttcgttgatgtagtatgagtaatatcgatgcagtagggtaggggtagggggattatcgaaagtgttagagacatgaatcaatatcccagactcatcattagatataaaaaattataaaattagtacttaaaaacaactacaaatccgtagaaaatatggaggtagtcttaaataaaatattgaaaattctcaaaaataaaaagttgatatgaaagcatttcaatacttcggtttgtctaacctcagacaaaccgaagtctaacgttattgcttgtgatatagaactatattagactaggtatattattttttcgtaattatataaatataaagtggcaaaggaggtaattgagatgacaacacatttaagttttagacaaggcgtgcaagagtgtatcccaacattattgggttatgccggtgttggtatttcatttggtattgtggcttcgtctcaaaactttagtattttagaaattgtcttgttatgtcttgttatatatgccggtgctgcgcaatttattatgtgcgcgttgtttatagcaggtacaccgatatcagcgattgtactaactgtatttatcgtaaattcaagaatgttccttttaagtatgtcgcttgcaccaaacttcaagacatatgggttttggaaccgtgttggattaggttcattagtcactgacgaaacgtttggtgttgctattacaccttatttaaaaggagaagctatcagtgatcgttggatgcatggtcttaatattacagcatatttattttgggcaatttcatgtgtagcaggtgcattgtttggcgagtatatttcgaatccacaagcattaggattagattttgctatcacggctatgtttatctttttagccattgcacaatttgaatcaattactaaatcgcgtttaagaatttacatagtactcattattgccgtcatagtaatgatgttatcgttaagtaagtttatgccttcatatctagcaatattaattgcagccacaatttcagcagcgttaggagtgatgatggaacgatgataactcatatgaatatcttaatacttattttattgtgtggtatcgtaacgctattaattcgaattataccttttatcatgatttcaaaagtacaattgcctgatgtcgtggttcgatggctatcatttattccgatcacactatttacggcacttgtcattgacagcattattcagcagacgcctcatggtgaggggtatacattaaacatcccttacattatcgcgctcattccgacggttattttatctataatcacgcgtagtttaactattacaattattagtgggattgttatcatggcagcattacgatttttcttttaaaaataactgaaaatcattgaacagatatttaaacttaggtaaactgttagtaatcagaaaattctgatatacaaatcgtctatgttaagattgggaatcgtgtatacgtaagcgatttggctaacgcatgacaatgataacaacattttaaatgataaaagtaattcatcactgaatctcaactaacacataacaatttcatatttcttattgtgagaagttgagggacttggccctgtgatacttcagcaaccgactttatagcacggtgctaaaaccaacgagttactcgaatgataagtataaagacttcttacttttcaatagggtgagaagtttttttgtttaaggaggaaagaacaatgacaaattacacagtagatactttaaatctagggaaatttattacagaatctggggaagtcatagataacttgcgtttgagatatgagcatgtcggttatcatggacaaccattagttgtagtttgtcatgcattaactggcaatcatttaacatatggaacagatgattatccgggttggtggcgagaaattattgatgggggatatatacccattcacgattatcaatttttaacatttgatgttattggtagtcctttcggttcaagttcacctttaaacgaccctcattttcctaaaaaattaacattaagagatattgttagagcgaatgaacgaggtatacaagcgcttggttatgacaaaattaatattttaatagggggaagtcttggaggtatgcaagcgatggaactactttacaatcaacagtttgaagtagataaagccattattcttgctgcaacaagccgaacatcatcttatagtagagctttcaatgaaattgcgcgtcagaccattcatcttggtggtaaggaagggctaagtattgcacgccaattaggttttttgacatatcgatcatcaaaaagttatgatgaacgtttcacgccggatgaagtagtcgcataccaacaacatcaaggtaataaatttaaagaacgatttgatttgaattgttatctgacactgctagatgtattggatagtcacaacattgaccgaggtcgcacagacgtaacgcatgtttttaaaaatttagaaacgaaagtcttaacaatgggctttatagatgatttgttatatccggatgatcaagttcgtgcattaggtgaacgttttaaatatcatcgtcatttcttcgtgcctgataatgtagggcatgatggattcctactaaactttagtacctgggcacctaacttatatcatttcttaaatttaaagcattttaagcgcaagtaataatgtatatattttcaaagaatgaagccactaaatcacagttgtcatattcaaaaacatctagagtacatgagagtggaaatgaattgtaaatctaaatcaagcttgattgctatgtagtgggattaaataatcatgttgaaaatgaaagcacacaaaagtgatacaaatgagtatgttaattacttattaaacatgaaagttattattcaattaaatgaaatagaagcatacaatctataaattgttaaattccattaaagaggttaaaataatagctatagttaaaaatatgggagtggcttatgtgttttcaaaaatacaacctaaagcaacaataatggcaacgattgcgttggtcattgtcgctttagctttatatctagtgcctggtttaggactaatatttgcattatttgcaaccataccaggtatcgttttatggaataaatcaatacaatctttcgggattagtgcacttattacagtaattataacaactgttttaggtaatactttcgttttaagtgctatcatattagtcttaattgtaagtttaattattggtcaattgctcaaagaaagaacgtctaaagaaagaatattgtacgtaacaaccgtagcgatgagtttaatctcattaatcgcctttatgttactacaaacattcggaagaattccaccatcagcgagcatagtaaaacctttcaagcaaacattacatgaagcgattacgatgagcggtgccgatgcgaatatgacccaaatattagaagaagggtttagacaagcgaccgttcaattaccaggtttcatcattatcattacatttttaatcgtcttaattaacttaatcgtcacatttccgattttacgaaaatttaaaatcgctacacctgtatttaagccacttttcgcgtggcaaatgagcggtattttattatggatatacattattgttatcatatgtttattatttacaggtcaaccgagtgtgttccagagcattcttttaaacttccaacttgtgttatcattagtgatgtatattcaagggttaagtgttattcatttctttggtaaagcgaaaggtttgccgaatgcagtaacgattttactattgattatcggtacaatactgacacctacgacgcatattgtaggactacttggtgttatcgatttaagtttgaatttgaagcgaatcatgaaaaataattctaaaaagtgaatagaggtggaataatgaatcggcagtccactaagaaagctttactaataccatttgtcatcatgatcatcacagcaattgttttaatgggtgtatggtttatctttaatagtcttatagctctaattgcatctatcgttcttgtcgtgatgattattgttagcatcgttttattcagacaagctttaatgaaaatggatagttatgtagatggtttgagtgctcaaatttcaacaacaaataataaagcaatcaaacatttaccaattggtatcattgttttagatgaaaatgatcacatcgaatgggttaaccaatttatgacagatcatatggaagcaaatgtcatttctgaatctgtaaatgaagtatttccaaacattttaaagcaattagatagagtgaaatccgttgaaatagaatataatcagtatcatttccaagtacgttattctgagaatgatcactgcctctatttctttgatataactgaacaagtacaaacaaatgaactatatgaaaattctaaaccaatcattgcgacattatttttagataactacgatgagattactcaaaatatgaatgatacgcagcgttcggaaatcaattcaatggtaacgcgtgttattagtcgatgggcaactgagtataatatattctttaaaaggtatagttccgatcaattcgtagcctatttaaatcaaaaaatattagctgacttagaagaatctaaatttgatatcttgagtcaattacgtgaaaaaagtgttggttatcgtgcccaattaacattaagtattggtgttggtgaaggtactgaaaatttaatcgatttaggtgaattatcacaatcaggcctagacttagcattaggacgcggtggcgaccaagttgcaattaaaagtattaatggtaatgtgcgtttctatggcggtaagactgacccgatggagaaacgtactcgtgtaagagcacgtgttatctcacatgcgttaaaagatatccttgcagagggtgacaaagtcattatcatgggacataaacgtcctgacttagatgcaattggtgcagcaatcggtgtgtctagatttgcaatgatgaataatttagaagcatacatcgtattaaatgagactgacattgatccaacattacgacgcgtgatgaacgaaattgataaaaagccagagttaagagagcgatttattacatcagatgatgcttgggatatgatgacatctaagacaaccgtagtgattgttgatacgcataaaccggaactggttttagatgaaaatgtcttaaataaagcaaaccgtaaagttgttatcgatcatcatagacgtggtgaaagcttcatctctaatccgttgttgatatatatggaaccatacgcaagttcaacagcagaacttgtaactgaattactggaatatcaaccaacagaacaacgtttaacacgtcttgaatcaacagtgatgtatgcaggtattattgtagatacaagaaactttacattacgaacaggatcaagaacattcgatgcagcgagttatttacgtgcacatggtgcagatacgattttaacgcaacatttcttaaaagatgatgtggatacttacattaatcgatctgaattaattcgaactgtaaaagtcgaagataatggcatagccattgcgcatggttcagacgataaaatttatcatccagtaacagttgcacaagcagcagatgaactgttaagtttagaaggtattgaagcatcatatgttgttgcgagacgtgaagataatctgattggtatatctgcgcgttcactcggttcagtaaatgtccagttaacaatggaagcacttggtggcggtggacatttaaccaatgctgcaacacaacttaaaggtgtgacagtcgaagaggcgatagcacaattacaacaagcaattacagaacaattaagtaggagtgaagatgcatgaaagtaatttttacacaagatgttaaaggtaaaggtaaaaaaggtgaagttaaagaagtaccagtaggttatgcaaataacttcttattgaaaaagaattatgctgtagaagcaacaccaggtaaccttaaacaattagagttacagaaaaaacgtgcaaaacaagaacgccaacaagaaattgaagatgctaaagcattaaaagaaactttatcaaacattgaagttgaagtatcagcaaaaactggtgaaggtggtaaattgtttggatcagtaagtacaaaacaaattgccgaagcactaaaagcacaacatgatattaaaattgataaacgtaaaatggatttaccaaacggaattcattccctaggatatacgaatgtacctgttaaattagataaagaagttgaaggtacaattcgcgtacacacagttgaacaataaagttggattgaaataagaggtgtaaccattcatggatagaatgtatgagcaaaatcaaatgccacataacaatgaagctgaacagtctgtcttaggttcaattattatagatccagaattgattaatactactcaggaagtgttgcttcctgagtcgttttataggggtgcccatcaacatattttccgtgcaatgatgcacttaaatgaagataataaagaaattgatgttgtaacattgatggatcaattatcgatggaaggtacgttgaatgaagcgggtggcccgcaatatcttgcagagttatctacaaatgtaccaacgacacgcaatgttcagtattatactgatatcgtttctaagcatgcattaaaacgtagattgattcaaactgcagatagtattgccaatgatggatataatgatgaacttgaactagatgcgattttaagtgatgcagaacgtcgaattttagagctatcatcttctcgtgaaagcgatggctttaaagacattcgagacgtcttaggacaagtatatgaaacagctgaagagcttgatcaaaatagtggtcaaacaccaggtattcctacaggatatcgagatttagaccaaatgacagcagggttcaaccgaaatgatttaattatccttgcagcgcgtccatctgtaggtaagactgcgttcgcacttaatattgcacaaaaagttgcaacgcatgaagatatgtatacagttggtattttctcactagagatgggtgctgatcagttagccacacgtatgatttgtagttctggtaatgttgactcaaaccgcttaagaacgggtactatgactgaggaagattggagtcgttttactatagcggtaggtaaattatcacgtacgaaaatctttattgatgatacaccgggtattcgaattaatgatctacgttctaaatgtcgtcgattaaagcaagaacatggcttagacatgattgtgattgactacttacagttgattcaaggtagtggttcgcgtgcgtccgataacagacaacaggaagtttctgaaatctctcgtacattaaaagcattagcccgtgaattagaatgtccagttatcgcattaagtcagttatctcgtggtgttgaacaacgacaagataaacgtccaatgatgagtgatattcgtgaatctggttcgattgagcaagatgccgatatcgttgcattcttataccgtgatgattactataaccgtggcggcgatgaagatgatgacgatgatggtggttttgagccacaaacgaatgatgaaaacggtgaaattgaaatcatcattgctaagcaacgtaatggtccaacaggcacagttaagttacactttatgaaacaatataataaatttacagatatcgattatgcacatgctgatatgatgtaaaaaaagtttttccgtacaataatcattatgattatgaaattgtacggtttttattttattctgaacgggttgatatatgttaagtttgtgtattgtaagtgataaattagtactgtcaacgcctctgttaaagggtttttaggacgttgaagactatttgctaaaatgatttttcttttaaaaaggccgaaaatcaatgttcgatttttatttgcattatggtctcgatattggtagaatatcaaatggttaaatgagaaaaacttggaggtgctcacatgtcatcaatcgtagtagttgggacacaatggggagacgaaggaaaaggaaaaataacggatttcttggcagaacagtcagatgttatcgcgcgtttttcaggtggtaataatgcaggccataccattcaatttggcggagaaacatataaattacatttagtaccatctggtatcttttacaaagacaaattagcggtaatcggtaacggtgtcgttgttgatccagttgcactattgaaagaattagacggattaaatgaacgtggcattcctacaagtaatttacgtatatctaatcgtgcgcaagtgattttaccatatcacttagcacaagatgaatatgaagaacgtttacgcggtgataataagattggtacaactaaaaaaggtatcggtccagcatatgtagataaagttcaacgtatcggtattcgtatggcagatttacttgaaaaagaaacattcgaaagattattaaaatcaaacattgaatataaacaagcatatttcaaaggtatgtttaacgaaacatgtccatcatttgatgatatctttgaagaatactatgctgcaggtcaacgtttaaaagaatttgtaacagacacatcaaaaatcttagacgatgcatttgtagcagatgaaaaggtacttttcgaaggtgcgcaaggtgtaatgttagatatcgaccatggtacatatccattcgttacatcaagtaatccaattgcaggtaacgttactgttggtacaggtgtaggtcctacattcgtttcaaaggtaattggtgtatgtaaagcttatacatcacgtgttggtgatggtccattccctactgaattattcgatgaagatggacatcatattagagaagttggtcgtgaatacggtacaacaacaggacgtccacgtcgtgtaggttggtttgattcagttgtattacgtcactctcgtcgtgtaagtggtattacagatttatctattaactcaatcgatgttttaacaggcctagacacagtgaaaatttgtacagcttatgaattagacggtaaagaaattactgagtacccagcaaacttagatcaattaaaacgttgtaaaccaatctttgaagagttaccaggttggacagaagacgtaacaagtgtgcgtactttagaagaattacctgaaaatgcacgtaaatatttagagcgtatttcagaattatgtaatgtacaaatttctatcttctcagttggtccagatagagaacaaacaaacctattaaaagaattgtggtagaactttatataagtcatacacaatgattataaatacatgagccttctatctttattggtaggaggcttttgctatgtttgcctctgtatcgattcgattatttagataaaaaatactaacgtaaaggtgatatttgctagtcataatttagaagattagatgatatttaacgaaaattaagatgaaatacttgaatgtaagaagtctgatgtcgaaaatagctattaaaatagagtagacgtaagtgtgaatgaaagtatctaaaatagaaaaatttcaaaaatagcgtaattattataatgaatagacagccaataaaatgcaatttttcacttataacattcttcaaaaaataatagcaaaattatgtaaaaaatatcttgtcatggcaagattggctgtgctataatctatcttgtgcttaagaacggctccttggtcaagcggttaagacaccgccctttcacggcggtaacacgggttcgagtcccgtaggagtcaccattttttaggtctcgtagtgtagcggttaacacgcctgcctgtcacgcaggagatcgcgggttcgattcccgtcgagaccgtacaaatgcctatccaagaggataggcatttttttgcgtttaatattatattaataaaagacatatcaggctgggacataaatcaatgttctatgctctacgaagttatattggcagtagttgactgaacgaaaatgcgcttgtaacaagcttttttcaattctagtcaaccttgccggggtgggacgacgaaataaattttgcgaaaatatcatttctgtcccactcccattttctttataatgtatgaacctcaagtaacttagtggttggatatgaaagataaacgtagacaataaaatctttattagacgtacaaatatatgctactgtcaacatatttcttcgttgtgatatgccaccaatcctccataacatcaattgttaaagtaacgaataatgatatttattttctgagcaatgacgtgcaactagaagttgccattaccctgattttattattggaatagagacctcatcattgtgttaaatatcattatcacaatccgccgtgagaaactaataaaaaatattaatatataagtttatattggaaaatagaattaatagcttataaatggtaaattatataataggttactatacgttataagacggaaaatgcgcacaataacaaaaatagtaagcgacatcctgtgattttttacacaaacataaacgataaagaacaaaaaatgataaaataatattaatgatttaagaaaagaggtttatgcaaatggctagaaaagttgttgtagttgatgatgaaaaaccgattgctgatattttagaatttaatttaaaaaaagaaggatacgatgtgtactgtgcatacgatggtaatgatgcagtcgacttaatttatgaagaagaaccagacatcgtattgctagatatcatgttacctggtcgtgatggtatggaagtatgtcgtgaagtgcgcaaaaaatacgaaatgccaattataatgcttactgctaaagattcagaaattgataaagtgcttggtttagaactaggtgcagatgactatgtaacgaaaccgtttagtacgcgtgaattaatcgcacgtgtgaaagcgaacttacgtcgtcattactcacaaccagcacaagacactggaaatgtaacgaatgaaatcacaattaaagatattgtgatttatccagacgcatattctattaaaaagcgtggcgaagatattgaattaacacatcgtgaatttgaattgttccattatttatcaaaacatatgggacaagtaatgacacgtgaacatttattacaaacagtatggggctatgattactttggcgatgtacgtacggtcgatgtaacgattcgtcgtttacgtgaaaagattgaagatgatccgtcacatcctgaatacattgtgacgcgtagaggcgttggatatttcctccaacaacatgagtagaggtcgaaacgaatgaagtggctaaaacaactacaatcccttcatactaaacttgtaattgtttatgtattactgattatcattggtatgcaaattatcgggctgtattttacaaataaccttgaaaaagagctgcttgataattttaagaagaatattacgcagtacgctaaacaattagaaattagtattgaaaaagtatatgacgaaaagggctccgtaaatgcacaaaaagatattcaaaatttattaagtgagtatgccaaccgtcaagaaattggagaaattcgttttatagataaagaccaaattattattgcgacgacgaagcagtctaaccgtagtctaatcaatcaaaaagcgaatgatagttctgtccaaaaagcactatcactaggacaatcaaacgatcatttaattttaaaagattatggcggtggtaaggaccgtgtctgggtatataatatcccagttaaagtcgataaaaaggtaattggtaatatttatatcgaatcaaaaattaatgacgtttataaccaattaaataatataaatcaaatattcattgttggtacagctatttcattattaatcacagtcatcctaggattctttatagcgcgaacgattaccaaaccaatcaccgatatgcgtaaccagacggttgaaatgtccagaggtaactatacgcaacgtgtgaagatttatggtaatgatgaaattggcgaattagctttagcatttaataacttgtctaaacgtgtacaagaagcgcaggctaatactgaaagtgagaaacgtagactggactcagttatcacccatatgagtgatggtattatcgcaacagaccgccgtggacgtattcgtatcgtcaatgatatggcacttaagatgcttggtatggcgaaagaagacatcatcggttattacatgttaagtgtattaagtcttgaagatgaatttaaacttgaagaaattcaagagaataatgatagtttcttattagatttaaatgaagaagaaggtctaatcgcacgtgttaactttagtacgattgtgcaggaaacaggatttgtaactggttatatcgctgtgttacatgacgttactgaacaacaacaagttgaacgtgagcgtcgtgaatttgttgccaatgtatcacatgagttacgtacacctttaacttctatgaatagttacattgaagcacttgaagaaggtgcatggaaagatgaggaacttgcgccacaatttttatctgttacccgtgaagaaacagaacgaatgattcgactggtcaatgacttgctacagttatctaaaatggataatgagtctgatcaaatcaacaaagaaattatcgactttaacatgttcattaataaaattattaatcgacatgaaatgtctgcgaaagatacaacatttattcgagatattccgaaaaagacgattttcacagaatttgatcctgataaaatgacgcaagtatttgataatgtcattacaaatgcgatgaaatattctagaggcgataaacgtgtcgagttccacgtgaaacaaaatccactttataatcgaatgacgattcgtattaaagataatggcatcggtattcctatcaataaagtcgataagatattcgaccgattctatcgtgtagataaggcacgtacgcgtaaaatgggtggtactggattaggactagccatttcgaaagagattgtggaagcgcacaatggtcgtatatgggcaaacagtgtagaaggtcaaggtacatctatctttatcacacttccatgtgaagtcattgaagacggtgattgggatgaataataaggaacatattaaatctgtcattttagcgctactcgtcttgatgagtgtcgtattgacatatatggtatggaacttttctcctgatattgcaaatgtcgacaatacagatagtaagaagagtgaaacgaaacctttaacgacacctatgacagccaaaatggatacaactattacgccatttcagattattcattcgaaaaatgatcatccagaaggtacgattgcgacggtatctaatgtgaataagctgacgaaacctttgaaaaataaagaagtgaagtccgtggaacatgttcgtcgtgatcataacttgatgattcctgatttgagcagtgattttacattattcgattttacgtatgatttaccgttatcaacatatcttggtcaagtactgaacatgaatgcgaaagtaccaaatcatttcaatttcaatcgtttggtcatagatcatgatgctgatgataatatcgtgctttatgctataagcaaagatcgccacgattacgtaaaattgacaactacaacgaaaaatgatcattttttagatgcattagcaatagtgaaaaaagatatgcaaccttacacagatatcatcacaaacaaagatacaattgatcgtacgacgcatgtttttgcaccaagtaaacctgagaagttaaaaacatatcgcatggtatttaacacgattagtgttgagaaaatgaatgctatactatttgacgattcaaccatcgttcgtagttcaaagagtggtgttacaacctacaacaataatacaggtgtcgcaaactataacgataaaaatgaaaaataccattataaaaacttgtccgaagatgaagcaagttcaagcaaaatggaagaaacgatcccaggaacctttgattttattaatggtcatggtggtttcttaaacgaagacttcagattgtttagtacgaataatcagtcaggcgagttaacatatcaacgtttccttaatggttatccaacgtttaataaagaaggcgctaatcaaattcaagtcacttggggtgaaaagggcgtctttgattatcgtcgttcgttattgcgcaccgatgttgtgttaaatagtgaggataataaatcgttgccgaaattagagtctgtgcgttcaagcttagcgaacaatagtgatattaattttgaaaaagtaacgaatatcgctatcggttacgaaatgcaagataatccggatcataatcacattgaagtgcagattaatagtgaactcgtaccacgctggtatgtagaatatgatggcgaatggtatgtttataacgatgggaggcttgaataaatgaactggaaactgacgaagacacttttcattttcgtgtttattcttgtcaacatcgtgttagtatcgatttatgttaataaagtcaatcgctcacacattaatgaagttgagagtaataatgaagttaattttcagcaagaagaaattaaagtaccggctagtattttaaataaatcagttaaaggcatacaattagaacaaattacggggcgttcaaaagactttagttctaaagctaagggtgattcggatttgaccacatcagacggtggaaaattattgaatgcgaacattagtcaatcggtaaaggtcagtgacaataacttaaaagatttgaaagattatgttaacaaacgtgtgttcaaaggttcagaatatcaattaagtgagattagttctggttctgtaaaatacgaacaaacgtatgataatttcccgattttgaataatagtaaagcgatgttgaactttaatatagaagataacaaagcgactagttataaacaatcaatgatggatgacattaagcccacagatggtgcagataagaagcatcaagtgattggtgtgagaaaagcaatcgaggcattatattataatcgttacttgaaaaaaggtgatgaagtcattaatgctagacttggttactactcagtcgtgaacgaaacgaatgttcaattgttacaaccaaactgggaaattaaagtgaagcatgacggtaaggacaaaacgaatacttactatgtcgaagcgacaaataataaccctaaaattattaatcattaatatgaatcgtaataagctagcattgcaagctcatcatatgtgagaagcggtgttagctttttgctggtatggtttattatggctgacgtttttgtgtcctaacatgcgcatttattcatatattaagtagaaccgcattgtaaaattaacgtaactgctattttaaaaactttagtatttgtctaatcattgttataataattaggacattcattgcacgtgattatcaaaatttaattataagagaccggtcgatgaactaaagttacataataggaaagatatacaaaacagctaatatactgatagtttctgtaggggaaatcgtatatttgcactgatgtatattgcagtcatttagagagagtgactgcataaatagaaaggatgagccgcttgatacgcatgagtgtattagcaagtggtagtacaggtaacgccacttttgtagaaaatgaaaaaggtagtctattagttgatgttggtttgactggcaagaaaatggaagaattgtttagtcaaattgaccgtaatattaaagatttaaatggtattttagtaacccatgaacatattgatcatattaaaggattaggtgttttggcgcgtaaatatcaattgccaatttatgcgaatgaaaagacttggcaggcaattgaaaagaaagatagtcgcattcctatggatcagaaatttatttttaatccttatgaaacgaaatctattgcaggtttcgatgttgaatcgtttaacgtgtcacatgatgcgatagatccgcaattttatattttccataataactataagaagtttacgattttaacggatacgggttacgtgtctgatcgtatgaaaggtatgatacgtggcagcgatgcgtttatttttgagagtaatcatgacgtcgatatgttgagaatgtgtcgttatccatggaagacgaaacaacgtattttaggcgatatgggtcatgtatctaatgaggatgcgggtcatgcgatgacagacgtgattacaggtaacacgaaacgtatttacttatcgcatttatcacaagataataacatgaaagatttggcgcgtatgagtgttggccaagtattgaacgaacacgatattgatacggaaaaagaagtattgctatgtgatacggataaagctattccaacgccaatatatacaatataaatgagagtcacccgataaagttccgcactgctgtgaaacgactttatcgggtttttgtttatgttgttggtgggaaatggctgttgttgagattaaggttctagttgaaatgtaaaaaataattcgatattaaatgtaatttataaataatttacataaaatcaatcattttaatataaggattatgataatatattggtgtatgacagttaatggagggaacgaaatgaaagctttattacttaaaacaagtgtatggctcgttttgctttttagtgcaatgggattatggcaagtctcgagcgcggctgagcagcatacaccaatgaaagcacatgcagtaacagtgatagacaaagcaacaacagataagcaacaagtaacgccaacaaaggaagcagcggctcatcaatctggtgaagaagcggcaaccaacgtatcagcatcagtacagggaacagctgatgatacaaacaacaaagtaacatccaacgcaccatctaacaaaccatctacagcagtttcaacaacagtaaacgaaacgcgcgacgtagatacacaacaagcctcaacacaaaaaccaactcaatcagcgacattcacattatcaaatgctaaaacagcatcactttcaccacgaatgtttgctgctaatgcaccacaaacaactacacataaaatattacatacaaatgatatccatggccgactagctgaagaaaaagggcgtgtcatcggtatggctaaattaaaaacagtaaaagaacaagaaaagccagatttaatgttagacgcaggagacgccttccaaggtttaccactttcaaaccagtctaaaggtgaagaaatggctaaagcaatgaatgcagtaggttatgatgctatggcagtcggtaaccacgaatttgactttggatacgaccagttgaaaaagttagagggtatgttagacttcccgatgctaagtactaacgtttataaagatggaaaacgcgcatttaaaccttcaacgattgtaacgaaaaagggtattcgttatggaattattggcgtaacgacaccagaaacaaagacgaaaacaagacctgaaggcattaaaggtgttgaatttagagatccattacaaagtgtgacagcagaaatgatgcgtatttataaagacgtagatacatttgttgttatatcacatttagggattgatccttcaacacaagaaacatggcgtggtgattacttagtgaaacaattaagtcaaaatccacaattgaaaaaacgtattacagtcattgatggtcattcacataccgtacttcaaaatggtcaaatttataacgatgatgcattagcacaaacaggtacagcacttgcgaatatcggtaagattacatttaattaccgcaatggagaggtatcaaatattaaaccatcattgattaatgttaaagacgttgaaaatgtaacaccgaacaaagcattagctgaacaaattaatcaagctgatcaaacatttagagcacaaacagcagaggttattattccaaataatacgatcgatttcaaaggagaaagagatgacgttagaacgcgtgaaacaaatttaggaaacgcaattgcagatgctatggaagcgtatggcgttaagaatttctctaaaaagactgactttgccgtgacaaatggtggaggtattcgtgcctctatcgcaaaaggtaaggtgacacgctatgatttaatctcagtattaccatttggaaatacgattgcgcaaattgatgtaaaaggttcagacgtctggacagcttttgaacatagtttaggcgcaccaacaacacaaaaagatggtaagacagtattaacagcgaatggtggtttactacatatctctgattcaattcgtgtttactatgatatgaataaaccatctggcaaacgaattaacgctattcaaattttaaataaagagacaggtaagtttgaaaatattgatttaaaacgtgtatatcacgtaacgatgaatgacttcacagcatcaggtggcgacggatatagtatgttcggtggccctagagaagaaggtatttcattagatcaagtactagcaagttatttaaaaacagctaacttagctaagtatgatacgacaaaaccacaacgtatgttattaggtaaaccagcagtaagtgaacaaccagctaaaggacaacaaggtagcaaaggtagtaagtctggtaaagatgcacaaccaattggtaaagacaaagtgatggatccagcgaaacaaccagcgccaagtaaagttgtgttgttgccaacgaatagaggaactgttagtagtggtagagaaggttctgatcgtgcattggaaggaactgctgtatcaagtaagagtgggaaacaattggctagcatgtcagcgcctaaaggtagcacacatgagaaacagttaccaaaaactggaactgatcaaagttcaagcccagcagcgatgtttgtattagtagtaggtataggtttaatcgcgactgtacgacgtagaaaagctagctaaaatatattgaaaaccatactactgtatttcttaaataagaggtacggtagtgttttttatggaaaaagcgataaccgttgataaatatgggatataaaaacggggataagtaataagacatcaaggtatttatccacagaaatggggatagttatccagaattgtgtacaatttaaagagaaatacccacaatgcccacagagttatccacaaatacacaggttatacactaaaaaacgggcataaatgtcaggaaaatatcaaaaactgcaaaaaatattggtataataagagggaacagtgtgaacaagttaataacttgtggataactggaaagttgataacaatttggaggaccaaacgacatgaaaatcaccattttagctgtagggaaactaaaagagaaatattggaagcaagccatagcagaatatgaaaaacgtttaggcccatacaccaagatagacatcatagaagttccagacgaaaaagcaccagaaaatatgagcgacaaagaaattgagcaagtaaaagaaaaagaaggccaacgaatactagccaaaatcaaaccacaatccacagtcattacattagaaatacaaggaaagatgctatcttccgaaggattggcccaagagttgaaccaacgcatgacccaagggcaaagcgactttgtattcgtcattggcggatcaaacggcctgcacaaggatgtcttacaacgcagtaactacgcactatcattcagcaaaatgacatttccacaccaaatgatgcgggttgtgttaattgagcaagtgtatagagcatttaagattatgcgtggagaagcgtatcacaaataaaactaaaaaatagattgtgtatagtataaaaggaagggatttatattaaaattttgacaataaaatgtaagcgctctaaaataaaaaattaactcgtacgtataagtggacaagaagggagttttataatgaaagataaaatattaggaactttatatggccaagctattggagacgctttaggtatgccttcagaattatggaatcgcaacaaaattaaagatttttttgggaaaatcacaacttttttagatggtccttatgaaaataaggtagccagaaatttcaccaaaggacagtttacagatgatactgcacaatcactactaatcattgatgcactaaataaaaatcattttgaaccttcaaaaaaaatcatagcagacgaattgattgaatgggccaatgctacaaacgcatttaaaaataatattcttggcccaagttctaaagcagctttaactgcaataatacaaggagaagattcccaattctatacaaaaaatgcattaactaatgggtcggctatgagaattgctcctattggtactttattttctaaagatcaaaaagtagagcttgtaaattatgttaaggaaattagtgaagctactcacacaagtgatgttgcaatagccggagctagtatgattgcttatgcagtaacattggcagcggaagataagaattggaaagaaattatagaaggcgttttggatattcacgatatagctattaaagaaggagaacaaactttttctgcatcaatagcagaaaggttaaaattagcagttcagtttgccaatcatttcgaaagtgaggaggaatattcgctctggctttatgatgtgataggatgcggaacatcattaactgaatcggtccccactgctttggcaattgcttatttttgtaaagaccccaataaatgcgcaattttttgtgcgaatattggtggggatactgacacaattggtgctatggcaactgctatatcgggagctaaatacggatatagtaattttaaaaaactttggatagagactatcgacaaacacaatagtgtgaacttagaacaatatgcaactacgctcgaaaaaaataaaatgttataaaaaatcgaggtgttcgttatggaaaaagaagaaatctttcttcctgaaagtgaaaaaaacgggaaacctatcgacttattttttatatggtttgcagccaatctaggtattctcgggatagtttatggcgctgtcatagtaagttacggattgagctttttacaatcaattttgattgctataataggaccgttatcctttgttctagttggttatataagtgtagctggtagagatagtggagctataacttttatgctctcaagagcaccatttggatttaaaggcaatcatatacctgctttaattggctgggtaggtcaagttggttggttatctgttaatgtttctacaggaactttaactcttctggctttattcaatacttttggttttaagactagtacatttctaattttgatgagtttagcgatttttgctgggctagttattatatctgttcttttttcacaaaaagtacttgtatcagtacaaacatttttcacatatgtatttggtgcattaaccttattagttataacaattttaattactaatactgattggaacgctcttttttctatgaaatctgggtcttggcttaaaggttttctacctgcattagcctttgtaatagtagggactggattgacttggactaacgcagctgcagattatagccgttttcaaaaaaaatcgaacagttctttatcaataatcactagtgttacagctggcgcgtttatccctttatttatcattataagtactggaattttattagctacttcagagccacaattagcaaatgcagaaaatccaatcttattaattagcgaagtactaccaaattggatgacagtaatttacttaatatctgctttaggtggccttactcctatgtgttttttaggtttaaagtcctcaagattaattatgagtacttttgatttgaaagtaaaaaattctacagttattattattcattcaattattattattgccattcctatttatgtcttagtagtttccagaaattttctcgctttttttgaaatgtttttaggagttttgggtattggattagctgcttggtctgcaattttcattgttgattatgcaacattgagaaaaaatataggctatgaaaaaaaattggtttgcgatccccagtataatagtctgaatattaaaacagtaatggtctggagtatagcagtaatagtaggtgcattaataaacatttttacttcttcaagttttgatataattgtaacatttatggttagcggatttttatattatatatttaatatttctttaaatattcacagaaagaaggctaaaaaatgaaaagttcattaagagaatatcaccagattaatagccaaaaaaaggttttggtgatcggcagtgctgttattgatgtgattttaaatgttaatagtataccaagtagtggatcggacgaatttgcccactctgagaagacaatagtaggtggttgcgcatataatgtaggcgatatacttagtcagttcaaagctaattatgatttgatggtgcccgttggcgatggtcctaatggaacaattattgaaaataagttaaaaaaagaaggcaaaacttcattattaaataatatattaggtgataatggttggacgttatgtatcgttgaaaataatggggaacgcacttttttaacgatacctggagttgaaatgacttggaaaaagaattggtttaaagaaattgatcttaataagtatgattatatttatgtgtcaggttattcttttgaacctccttcagacgaagttttattagaagaatttagtcgtttaaacgagaaaactacaattatttttgacccctcaccaaggattaataaaatgaactgtgagagtataaggaagttgcttgaaataaacacaatagtacatgccaacgaagatgaaatattacaattgagtagtgagaatcatgtgaaagatgcggcattagaagtaagtaaacagactaatcaacctgtgatagttacgttaggcaacgaaggtactcttatagcaaataagtgtaaagttaagattttagagggggaaaaggttcctgtaactgatactataggcgctggtgattcacacacagcagcttttatagcaggtttgctagataaccaaagtattgaaaaagcttgtatatggggaaacgaagtagcatctaaaattgtgcaagaacaaggtggaaatacggatatattcaatcctatagatgaagaatattaaatttgtctcacgcttactatcttcaacagttgttgtattttagctttaggcttataaactatttaaaagaaggttctgttgcaaagtaaaaaatatagctaaccactaatttatcatgtcagtgttcgcttaacttgctagcatgatgctaatttcgtggcatggcgaaaatccgtagatctgaagagatctgcggttctttttatatagagcgtaaatacattcaataccttttaaagtattctttgctgtattgatactttgatactttgtctttcttactttaatatgacggtgatcttgctcaatgaggttattcagatatttcgatgtacaatgacagtcagctttaagtttaaaagctttaattactttagccattgctaccttcgttgaaggtgcctgatctgtaattaccttttgaggtttaccaaattgtttaatgagacgtttgataaacgcatatgctgaatgattatctcgttgcttacgcaaccaaatatctaatgtatgtccctctgcatcaatggcacgatataaatagctccattttccttttattttgatgtacgtctcatcaatacgccatttgtaataagcttttttatgctttttcttccaaatttgatacaaaattggggcatattcttgaacccaacggtagaccgttgaatgatgaacgtttacaccacgttcccttaatatttcagatatatcacgataactcaatgtatatcttagatagtagccaacggctacagtgataacatccttgttaaattgtttatatctgaaatagttcatacagaagactcctttttgttaaaattatactataaattcaactttgcaacagaaccgtattatggaatagagatgttggtaacatttatacaggatcattatacttaagtttaatttcgttattacagaaccacacattccaaccagaagagaaagtatgtctatttagttatggttcaggagcagtaggagaaatctttagtggttcaatcgttaaaggatatgacaaagcattagataaagagaaacacttaaatatgctagaatctagagagcaattatcagtcgaagaatacgaaacattctttaacagatttgataatcaagaatttgatttcgaacgtgaattgacacaagatccatattcaaaagtatacttatacagtatagaagaccatatcagaacatataagatagagaaataaactagtggccgattgtgcttgatgagcttgggacataaatcctaactcgaaataaataagcatatcactaaactgattttttaaagtttacagtgatatgcttatttttttatcttacgattttgtacgtgcatgcttgcctaggggtatggctcgagccattagtctctcgcacatactattccctcaggcgtcagcacttacaaaatcggttgtaattttcatttttatacgcattcttactgagattatactaataagaggaatagtaaaagcaattctaagtaaaattgcagataagaggtttgttaaaagcagttctaagtaaaattgcagataagaggtttgttaaaagcagttctcagtaaaattacagataagaggtacgttaaaagcagttctaagtaaaattgcagataagaggtttgttaaaagcagttctaagtaaaattgcagataagaggtacgttaaaagcaattccatgcaaaattgctgataaggggtaagttaaaagcagttctcagtaaaattgcagataagaggtacgttaaaagcagttctaggcaaaattgcagataagaggtttgttaaaagcagttctcagtaaaattgctgataaggggtaagttaaaagcaatcctaagtaaaattgcagataagaggtaagttaaaagcaatcctaagtaaaattgcagataaggggtacagaaaaactagacttgattacaaaatggagcttgggacataaatgattttttaaaaatgagatgagacgtagattaactccataatcaatacgaatctatcgacttctttatttatgatattcatctctttttaatggaaataaaagtgcgattaatgtgataatacagttacgttaattaaaaaaataaaaatgcaaggagaggtaatatgctaactgtatatggacatagaggattacctagtaaagctccggaaaatacaattgcatcatttaaagctgcttcagaagtagaaggtataaactggttggagttagatgttgcaattacaaaagatgaacaactgattatcattcatgatgattatttagaacggactacaaatatgtccggggaaataactgaattgaattatgatgaaattaaagatgcttctgcaggatcttggtttggtgaaaaattcaaagatgaacatttgccaactttcgatgatgtagtaaaaatagcaaatgaatataatatgaatttaaatgtagaattaaaaggtattactggaccgaatggactagcactttctaaaagtatggttaagcaagtggaagaacaattaacaaacttaaatcagaatcaagaagtgctcatttcaagctttaatgttgtgcttgttaaacttgcagaagaaatcatgccacaatataacagagcagttatattccatacaacttcgtttcgtgaagactggagaacacttttagattactgtaatgctaaaatagtaaacactgaagatgccaaacttactaaagcaaaagtaaaaatggtaaaagaagcgggttatgaattgaacgtatggactgtaaacaaaccagcacgtgcaaaccaacttgctaattggggagttgatggtatctttacagacaatgcagataaaatggtgcatttgtctcaatagaaagttagaggtgagtcttacgtttcagtgacggtagacttacctttaacatgttacatactaaaaaattaatttgaataagaaagagagacatatatgaaatacgatgattttatagtaggagaaacattcaaaacaaaaagccttcatattacagaagaagaaattatccaatttgcaacaacttttgatcctcaatatatgcatatagataaagaaaaagcagaacaaagtagatttaaaggtatcattgcatctggcatgcatacactttcaatatcatttaaattatgggtagaagaaggtaaatacggagaagaagttgtagcaggaacacaaatgaataacgttaaatttattaaacctgtatacccaggtaatacattgtacgttatcgctgaaattacaaataagaaatccataaaaaaagaaaatggactcgttacagtgtcactttcaacatacaatgaaaatgaagaaattgtatttaagggagaagtaacagcacttattaataattcataataaaacagtgaagcaaccatcgttacggattgcttcactgttttgttattcatctatatcgtattttttattaccgttctcatatagctcatcatacactttacctgagattttggcattgtagctagccattcctttatcttgtacatctttaacattaatagccatcatcatgtttggattatctttatcatatgatataaaccacccaatttgtctgccagtttctccttgtttcattttgagttctgcagtaccggatttgccaattaagtttgcataagatctataaatatcttctttatgtgttttatttacgacttgttgcataccatcagttaatagattgatattttctttggaaataatatttttcttccaaactttgtttttcgtgtcttttaataagtgaggtgcgttaatattgccattattttctaatgcgctatagattgaaaggatctgtactgggttaatcagtatttcaccttgtccgtaacctgaatcagctaataatatttcattatctaaatttttgtttgaaatttgagcattataaaatggataatcacttggtatatcttcaccaacacctagttttttcatgcctttttcaaatttcttactgcctaattcgagtgctactctagcaaagaaaatgttatctgatgattctattgcttgttttaagtcgatattaccatttaccacttcatatcttgtaacgttgtaaccaccccaagatttatctttttgccaacctttaccatcgattttataacttgttttatcgtctaatgttttgttatttaacccaatcattgctgttaatattttttgagttgaacctggtgaagttgtaatctggaacttgttgagcagaggttcttttttatcttcggttaatttattatattcttcgttactcatgccatacataaatggatagacgtcatatgaaggtgtgcttacaagtgctaataattcacctgtttgagggtggatagcagtacctgagccataatcatttttcatgttgttataaatactcttttgaactttagcatcaatagttagttgaatatctttgccatcttttttctttttctctattaatgtatgtgcgattgtattgctattatcgtcaacgattgtgacacgatagccatcttcatgttggagctttttatcgtaaagtttttcgagtccctttttaccaataactgcatcatctttatagcctttatattctttttgttttaattcttcagagttaatgggaccaacataacctaatagatgtgaagtcgcttttcctagaggatagttacgactttctgtttcattagttgtaagatgaaatttttttgcgaaatctcttaaatattcatccatttttttaacggttttaagtggaacgaaggtatcatcttgtacccaattttgatccatttgttgtttgatatagtcttcagaaatacttagttctttagcgattgctttataatcttttttagatacattctttggaacgatgcctatctcatatgctgttcctgtattggccaattccacattgtttcggtctaaaattttaccacgttctgattttaaattttcaatatgtatgctttggtctttctgcattcctggaataatgacgctatgatcccaatctaacttccacataccatcttctttaacaaaattaaattgaacgttgcgatcaatgttaccgtagtttgttttaattttatattgagcatctactcgttttttatttttagatactttttttattttacgatcctgaatgtttatatctttaacgcctaaactattatatatttttatcggacgttcagtcatttctacttcaccattatcgcttttagaaatataactgctatctttataaacttgtttgaaatttttatcttcaattgcatcaatagtattattaatttctttatcttttgaagcataaaaatatataccaaacccgacaactacaactattaaaataagtggaacaatttttatctttttcatcaatatcctccttatataagactacatttgtaatatattacaaatgtagtatttatgtcaaaataatgttataatttttgtgatatggaggtgtagaaggtgttatcatcttttttaatgttaagtataatcagttcattgctcacgatatgtgtaatttttttagtgagaatgctctatataaaatatacggttctgttgcaaagttgaatttatagtataattataaccaaaaggagtcttctgtatgaactatttcagatataaacaatttaacaaggatgttatcactgtagccgttggctactatctaagatatgcattgagttatcgtgatatgtctgaaatattaagggaacgtggtgtaaacgttcatcatttaacggtctagcgttgagttcaagaatatgccccgattttatatcaaatttggaagaaaaagcataaaaaagcttattacaaatggcgtattgatgagacgtacatcaaaataaaaggaaaatggagctatttatatcgtgccattgatgcagagggacatacattagatatttggttgcgtaagcaacgagataatcattcagcatatgcgtttatcaaacgtctcattaaacaatttggtaaacctcaaaaggtaattacagatcaggcaccttcaacgaaggtagcaatggctaaagtaattaaagcttttaaacttaaacctgactgtcattgtacatcgaaatatctgaataacctcattgagcaagatcaccgtcatattaaagtaagaaagacaaggtatcaaagtatcaatacggcaaagaatactttaaaaggtattgaatgtatttacggtctatataaaaagaaccgcaggtctcttcagatctgcggattttcgccatgccatgaaattagcatcatgctaacaagttaacacaaagtattattttaaaattgagattagacatttatttttcaactttgcagcagaacctaattttttctctttgtaaataaatgcaaagagataccataaggatctcttacataaccataaccttcagtatagaattctggactaaatgttttcaatacctcactgcctttttctattaactggtcatatacatgtttagtttcttctacttggtcaaaagtgagacaaagagatatattattaccttgtgttatgggcaaaccttcagtgtcatctgcgatcataatttttatatctccaaattgaagtacacattgatcaattttatttaaatcattttcgtcaatattaagtttcttatctataggtctatctttaatacgttgaatatacagtgttttagcgccaaacagctcttcatacaacttttttaaaccctctgcattttgagtgattaaaaaatatggacttacttgaaatttcatgttttttcctccttagatttgttataaatagagtatatacttaattagtgtcatctattgacactaaaaggagaataataatgaaaaaatctgttagattatataatatgattgaatattgtaatgaaaataggaacttcaaattaaatgatttaatgtcagaatttaatatttctcgtagtaccgctttaagggatataaaagaaattgaagcattaggagtacctttatatagtaatccagggaaaaatggtggttatacgatcataggtaatcgagaccaaacgaaaatagcaatctcagatgaagagttgaaagctttagtatttacactttcgagtatttcaaatgtgagtaatctaccttttcaaacagaatatcaagaaatattaaaaaaattatataataactcgaataaaaaagagttaataaaccaatataatgatctatttcaatattttaatgaagataagtatcagttcaaaagttataagttatttaatgaaatcattagattgataattgagaataagtcttttgaaacctgttattcacaaaactatattaaagaacaatataaaggtattggcattatgtataaaaatcatcaatggtattttgttgtagctaatatagaatcaaagttagtgaatctattaaatatttcgaaaataaaagaactatatgaaatgggagagactcaagagtgtaatgatataactatgcagaattttcaacagttcatggttaaaaatgaaacagctattgatattcttattagaagcaatgttatgggattgaatatcttgaaaggctacctgtggagtgactatatgattgaaaatattgacgaagagacatatttatttaaatcaaaagtgaacgcgaaagatatagattttatagctaagttaattgtcacaggtggtgtcaatgtaaaagtagagacccctaatagtttgaaaaatgctgttaaagttgaattaactaaaataataaacatgtattaatagtaatttaatcataattgtaataacaaaaagatgacaacattaaacaatttaaatttatacaaaaaagcattaccaaatttaaaattgggtagtggtagtgctacagcatacataaatagttataattaaataaagatgggtcaatgaaggtgaattaagtgaataaaaatattacagctctaaaatctactgaaaatactacatatatgcagtatacggttcatatcgatgatcaaattataaataatataaaagagtgtaccaaaaagtttaaaattttgcctatggaagataaaattccattatcaccgttgttacaaccagaatatgcaggagaggtacaagattttattagtacatatgagcagtttatgattaattttggtaaagtaatattggatagtcaaggcataaaaatacagtttgaaagtgaatcattaagtagtattcaacgaggcattcaagaacattgttacttaaatgagcgaacaaatgacattgatgtgactaaagaatggtatttatgcaaattttcaaatcaaatattagaagaggataaaaatcaattgtataatgctttaaagcaactcatgaatgattctaaaaataaaaagcaagcttttcaagaggtgtttaaggttcatattgatatttatctctacaataaagaaaaatctgaatataagtatcaagtatctagttatttcaatcttgtaaaagaaaatcctaaaataacttataaaaaaagacatttacaagagaaacaaggtgtcaagggtacaactttcacgaacaaattaaaattattgaacaaaatgtatggtgtagatgttgcaaaatatcagccattttataattctaataatcctgaatatgaaagaggtcaatttggtgaaagatacatttctcaaagatctaactatgaatttaatagacttcaatatcaaattatagatatgttatcgaaaatacttgataagcatccattaccaaagtcagataataattataaacatattccaactattgaaaaagcaatattaagtggggattctcatagtttttatgagtattttgaagatataatgaaagaaattataagtatggaaaattcttctttaaaggaaaaattattgactgattttacatatcaatctcaatgtagatggtactctgaaagtgaaaaattaaaattgcaacttgaaagttttatgcataaagttttggagagcaattattatgagggtaacaaattatatagaatgttgtctcatgcaattgaagaaacaatcaatgaggctgatgaagataaggttcatttcaattattttaaagattattttttgacagacggtggggtgaagaattgggagcagattagcgagaaaattactgaattcaatggtaaagttattaacgatatccaaaatgaatataataagattcaatttaataacgcaaatcgaaatcagaaactaaactttaattatttataccattgctttgagtttagtaataacttagtaaaagcaagggtaaatggaaatagaggttacattttatattttgtagataaatataaaataaaaatgccctttttggatcaattattaatcaattatttgaatcaagaaataggtcaggaaagtattaattataatatgcaaacattgtttgaaaaagaaagatatgatagaagtagtaccattgaaaaattagtagcaacaagcaaatttaagtatgaaaaagatgattcagatttattcaaacaacttttcaatgatgttgaaaattcaatagacagattaggtatttacttactaaataatggtataaattcgaatgatgaaaatgcaagatattatagatcgtttttaaaggaacttagtagaataaaaagtaaattaacgccattttctcttgaaataagtaagtctagcggaagagagcaacattatcctgatgatgctattgatgataaagatgagagaagaaaaaataaagaagaaacatatcatgcttttgatgataaaagcgatattgactccaaattaaagaataaaataaatgtttctatcgataatttattgtcagttaaaattaagagcaatttgtatgatattagtccaaatacaaaaaaacaataactataatgagccaactcaagaatgagttggctttttaattgtaattttacgcttccattacaggaatcaatgttatggaagccattaagcaattaatttgagtcatttatagtataggtacaacgttgtgatgttcacatgataatcagcccgggagattattgtgtaataacttatagaaggagcaaatcaccatgtatcaagcaaatatacgtgatttaattacaaaattgcctcaaagcaataaaacagaacactttttaatgaacaaattttcaaatcaagataaagttcagcagctacaaagacaaattagccaacagctagatcaacaatataatgagcttttggctaatgaaaaagctaagctagaccaatacgtggaagtacaccataatttagaaccattaaagaaagagattgaatcagaatctattaaccttgataccgataaattacctgatatcaaagcgacaatgcttgaaaaggctaagaacgatgaacattttgataaaatcgaacagctatttgatagattagatcagtcattaaatggtacgaatcgattatatacgcaattatcgttgattggcacacgaacacatcggatcacaacgaaaagatttaatgttcaaggcttgcctaaattagtccaacaaatgattttaccttcgcaatttaaaaaggtttatacaatagattttaaatcattcgaaccatcagttgctgcgtatatgacacaagacgaacaactgattgactacttgaatcatgaagaagggttatacgatgcattactgagagacttatctttgtcaaaagagaagcgcgtgagtgtgaaacgtgcatttatagggtcatttctttttggcggtcgttatagtagctctaaattcaaaatcaatcaagaggttagtgaaattaactggctacaagtaatgagcaaattcaagaaggtcattgaatttaaggagcaagtcgaaaaatataaaacaatgcctacgccttacggcattgaacatgatatgagcgcatttcaaggtagtagtattatggcaatttatgtacaaacggtagcaagctatattttcaagcacattttgttggaagtgtacaaagcacagtgcgaaaaaaaaacgttcaagattatagtgccgatacacgatgcgattatgattgaatgtaatgataaggggattgcacaaaatgtagcacagctcatgaaagatacagctaatcaactgtttaatggtgaatttgcacatgtgacagtggaagctttaggaggtatagacaatgaataatgatagaggaaaaagtcttcaaattccccaaagtacattgttaaaagaaggatctatatacgttgctacgttacattctgtgtacgagaagaacttctcaggtgatattaaacatcagtttacgtatgaagtagaacttaaccaagaaacgcactatgtaaatcgcaatattaccgtaaaatctatgagtcaccaattatcaattgctgattggattaaacgtcacagtaactataacgtaaaccacattaattatgatccatacattgatcgaaaacatttggtccttgtagggcaatataacggaaattattatattcaagatgtagcaccattagatgaatttggaggggtattgtaatgaatcatattttagaaatgttaataaaattattaaaagtgggtatggaggcaatcgaccgtaaaggtctgattgccatcctaacaagtagtattggaaatgatgaaatggatgattctgaacaagctgtaatggtgtataacgagcttatcgataagctacagcttaacattcctaaagatgtcgactatagacctaacatatacagttattttggtattcaaaaaaagccaaatgacacaatattagtggaaatgatgatatgtatttttcatatcaagcgttttgattcagagttgtttgttttcaaagataaaggttggcaaaaggtaagtgaagatgaattgcaagggttgatatctaaaatgatacaagtgttgctagttgattataaaccttcactaagtactttgaaaaacgtagtagatggcatacagaaatcaacggacatagaaaaacttgttgagcatagacagtacattggttgtggacgaaatatgttcaatctaaagacctttaaagtggttgataatgaccttgaaatattccctaaaacacgcttagatttggaattagatataaatgacacgattacggacaagatacccccgaatttcaaacaatatatgttagagttggcgaattatgaccatgatttacaatatttccttttccaacatatggcagtgttattgacggcagatactaaactacgtcgtggactttttttgtatggaactgcaaaaaatgggaaatcggtctatattaaattagttaagtcattcttttatagtaatgatatcgtatctaaaacacttaatgaacttggcgggcgtttcgataaggaaagtctaattggtaaacgaattatggcaagtgatgaagtggggaaagctaatattgatgaagcaactgtgaatgatttcaaaaaattactatctgttgaaccaattcatgctgaccgtaaaggaagaacgcaagtagaagttactttagatttaaaactcatttttaatacgaatgctgtactcaattttccatcatcacatgcaaaagcattagagcgtagaattgctgttattccatgtgaatattatgttgaaaaagctgaccctgacttaattgaaaagttacaggatgaaaagaaagaaatctttctttacttgatgtatgtgtataagcaaattgtaaaaaatgatatcgagtacctccaaaatgatcgtgttactgaaatttctcatgattggttaaattttggatatgaatttgtttctagtaaatcagcaaatattgcacatcagaaagcgtgtattaatttactcagaaaacttatagaaatcaaaccagggtcacgtatcaaagtgtctaggctaaatgaggttattagagatgaaattaaagtaagctctcaagttattaatgatttggttcaagctaactttaatgtacaaagtagactaaataatggttataagtattgggtcgatttaggatggaaagaaactgataaaaaagatgacatgatttcattcgataaaaatgagaatgtaacagatgatgaattcttatacgaagatgatttgaacttaggttgggaggactttgacgatgaataatgaacaaattgaagcatttgtagaagtgcttgtgcctatcatagaagaacgtatcaataaaggtaagtaatctaattacgtactacaggcagttgcctgtagtactcatatgattaagtggtaaaagtgataaaaatgaaacgaaattataaatatatattatctatatgttgttacaagaccgatggtctgtagcaataatctaataaaaggagcggtatgatatgaagggtaaaattgcactttattcacgtgttagtacgtctgagcagtcagaacatggttattctgaaaaggagcaggaacaactactcatcaaagaagttatgaaaaatttcccaggttatgactatgagacatatactgactcaggcatttcaggtaaaaatattgaaggtcgtccggcaatgaaacgtctattacaagatgttaaggataataaaatcgaaatggtattaagttggaaattgaatcgtatttctcgctcaatgagagacgtgtttaatattattcatgaattcaaagaacatgacgtagggtataaatcgatttctgagaatattgatacatccaatgcttctggagaagtactcgttacaatgtttggactaataggatctatagaacgccagactttgatttccaatgtgaaactttctatgaatgctaaggcaaggagcggagaggcaatcaccggtcgtgttttaggctacaaattatcacttaatccattgacacagaaaaatgatttagttattgatgaaaatgaagctcatattgtacgggaaatctttgatttatatttgaatcacaataaaggatttaaagcaatcacgacaattctaaatcaaaaaggatatcgtaccattaatcaaaaaccattttcagtgtttggcgtgaaatacattttgaataatccagtctataaaggctatgtcagattcaataatcatcaaaattgggctgttcagcgaagaagtggtaaaagtgataaaaatgatgtgatattggtcaaaggtaagcatgaagccattataagtgaagatgtatttgatcaagttcatgagaaactagcttctaaaagttttaaaccgggtcgacctattggtggagatttctacttacgtggccttattaaatgcccagaatgcggaaataatatggtatgtcgacggacgtattataaaacgaaaaagtccaaagaacgcacaatcaaacgctattacatttgttcattattcaatcgctcaggaagttctgcctgtcatagtaatgcgattaatgctgaagtcgtcgaacgcgtaatcaatgttcatttgaatcgtattctttcacaacctaatgttattaagcagattgcgtcaagtgtgatagaagaactgaaacaaaagcatagtaaacaaacagaaataaaatatgatattgatagtctagaaaaacaaaaagcaaaagttaaaacacaacaagaacgattattggaattgttcttagatgatgaaatggatagcgaaatgttaaaagctaaacaaagtgaaatgaatcaacagttagaagtattagaccaacaaattaaagaagcaaaacaagcaaatcaatcacaggatgatatacccaattttgataagttaaaagcacgactcattttgatgataacacgattcagtgtgtacttaagaaaggctacacccgaagctaaaaatcaacttatgaaaatgttaattgattcaattgaaattacgacagataaacaagtaaaacttgtaaggtataaaattgatgaaagtcttatccctcaatctttgaaaaaagattgggggtctttttttatacctaaatttaactttgtgataaatgtcacaaagaaaaataggattgaaaatttatcacttttaccacttttttagagtgacaaaagtggaggagttttgaaatattttataaatatatattttatttatggagtacacattattaattaaggaggtcattataatgacgctaagcaaacaacttaaaacgtatatcactgaacgatttaaattaaattatcaagaaacttgggcttgtgaaaccatagatgcggtggctgaagatgtattacctgaaaaatatattaaaaatagtccacttgaacataaaattttaaatacttttacctattacaatgatgaattacatgaaatcagcatttacccttttttatgttatctagataaggaattagtagcaataggttatttagataattttgatttagactttatatttttaaatgacactcatcaaattattattgatgaacgctacttgttacaaaaagggggcgagtaattatgaactggatcaaggttgctcagctatctgttacagtcattaacgaagtgattgagatcatgaaagaaaagcagaatggaggaaaatagtatgaacatcaatcgatacatcacgagaggcattagtgaacaactatctctagaccttcaaatcttactttggcacatggtagaagaaaaagataaccagcctcataccgattacctacacattttcaaactacaagaagatgataatatgttgtcaattacacatgaacaagaacagcccgcatacaagttagaatatcactatataaactatgaaaaaaatcaaaatgcattacctaagaaagtctacgtcattcgtgaagatgatgtagacgttttttattatgtgatgcttttaccagaagaatactaaaaggagtgacgttgatgaatacaatcaaaagtacgatacacacagaagctatatttagcgatgatgaacaacaccgctacttactcaaaaagacttgggatgaaaagaaacctgtttgtacagtgataacgatgtatcctcatttagatggcgtattatcactcgatcttactactgttcttatcctcaaccaattagcgaattctgaacaatatggcgctgtatatctagtgaatctattctctaatattaaaacaccagagaatcttaaacatattaaagaaccttatgataaacacacagacatccatttgatgaaagcaattagtgagagtgatacagtaattctagcttatggcgcctatgcaaagcggcctgttgtcgtcgaacgtgttgagcaagtgatggaaatgttaaaacctcataaaaagaaagtcaaaaaactcataaacccagcaacaaatgacattatgcatccacttaaccctaaagcacgtcaaaaatggattttgaaataaaaggaggattatctatgaaccatgaaactacacactcagactggcgaacggttgctaattgtttagcatcacaaaattatatatcgatcgtaaaaggattagtacatcatttcacagcgattgaagatgaagaaatactagataaaatctatgaagattttatgaataatggctctattacaacggtacttaacaatgatttacaagatattattaattattacctatcaaaataaaaatatattacttttaataaaattagagcatccttcactttgcggtgagagatgctcttttagtttatttttttattgattactcgccataagttctgcttgctctacagccatttttataaatctggtggatagctatattttttaagtaatcgtctaacagctacgcgcattttagcttttgcgctatcacgtttagaccaatcacccccatattttctttcacttttttagttagctcatgagcaatcgcacgtagttcttcatcttccattcctttttttcgctgtttcatgtgaaactaaagcatcgtaaaaatgcgatttcatctgaatttaaacctaattcatttcctcgttgttgttcttgtttaatatctttggcgagttgaatgagttcttcaatcacttttgatgtttcaatggaacggctattatatttattaatcgaatttcttaacatttcagagaaacgtttagataccgtcgcattcgttttcattaatgatttgacttgtcccttgagtaatcgatttaataattctaccgccacatttttctgtttcaatccttctacatcttttaaaaagtcatcagataggattgataaatcgggttgttcaagacctaaagtttaataaatgtcaagtcaatgaaatcttcagttaatagtgtatatttgattattattagtttaaatatattaaaattaaatacttattatatatggttctttactattttagaagtatattttttattttcctgaacagtagttattaaatttatctcttattttaaattagaaaggaagaaaaagttaaatttatattaagttttatatatgattaattattaacgtattaaatgtagtatactcttaatatatagaaaattatcataatatttgtcaaaaaaagtgacatttcatatagtagcatggtgttagttgtcacagtttttgacagccaaaataacacttgaacctttgtggttatgctatttattaaagtatctgatcgataactaccccgaataacaggggacgagaattctataagttcattaattccgatacctagattatctgatcgataactaccccgaataacaggggacgagaatttttttccaccctttcagatcatctatgatcttggatcgataactaccccgaataacaggggacgagaataattttctaattctataagttcattaattccgatgatcgataactaccccgaataacaggggacgagaattatactatttacataattttttatgtgtctgtctacgatcgataactaccccgaataacaggggacgagaattaatagtgttgttctctattaaaagatacaatcctgtgatcgataactaccccgaataacaggggacgagaattagaatgttattatctaagtggtcgatgtattccgatcgataactaccccgaataacaggggacgagaattcatactagcaccccactctctactgaacaagtatcagatcgataactaccccgaataacaggggacgagaatcttaaaatctaattgcattgttatcaattcctttagatcgataactaccccgaataacaggggacgagaattctgtaatgtattcatttaatgtaatcataattttttcgatcgataactaccccgaataacaggggacgagaattagaccatttacctcattatatttatagtctttattagatcgataactaccccgaataacaggggacgagaatttttctttaactgtttttactgcccatttaatagtgatcgataactaccccgaataacaggggacgagaatatatttcttccatgaataacaccctccttttttctagatcgataactaccccgaataacaggggacgagaataagttaacggcattacctaataaaaatattttagggatcgataactaccccgaataacaggggacgagaactcatctttcatgtcactgattaattcatttgtagatcgataactaccccgaataacaggggacgagaacggtaatagttgctcaataggtaataaaacgtcggtgatcgataactatcccgaataacaggggacagagtgtaaatttaattacactctaaaatttgtaaatttttaatggaatacgcattgattaatttttaggggatgaaaaatgaaagatgttatttatgtagaaaatcattactttgttaccgtgaaagaaaatagtattaaatttagaaatgtaatagataaaagtgagaaattttatttgtttgaagaaatagaagcgattatttttgatcattataaaagctatttttctcataaattagtaattaaatgtatagaaaatgatatcgctattattttttgtgataaaaagcactctccattaacgcaacttatttcttcttatggtatgactcatcgtcttcaaaggattcaaagtcagtttcaattatctgggagaactagagatagaatttggaaaaagattgttgtaaataaaattattaatcaatcaaaatgtttagaaaacaatttacataatgagaatgtgaagttattagtaaacttagcaaaagatgttagttctggagataaaagtaataaagaagcacaggctgcaagaatttattttaaagatttatacggtaaacaatttaaacgtggacggtacaatgatattattaactcagggttgaattatgggtattcgatacttagatcttttataaaaaaagaactagctttacatggattcgaaatgagtttaggcattaatcatcgttcgaaagaaaatccatttaatttagcagatgatattattgaagtttttcgtccttttgtagataatatcgtgtacgagatagtttttaagaaaaatattaatacatttgatgtaaatgaaaagaaattattgttaaatgttttgtatgaaaagtgcattatagataaaaaagtggtgaggttacttgatagtgtgaagatagttattcaatcacttattagatgctatgaagaaaacacccctacttatttattactacctaaaatgattgaggtggggaactaatgtatttattagttagttttgacttacctagagatactaaatttgaacgtagagtcgcaagtaagtatcgtactcgattattagaactcggttttagtatgaagcagtttagtttatacgagaggtatgtcagcgatgttcaaaaaaaagataagattttagaaattctgcaacaagaaattcctgatactggaagtattacactatatgtcttacctgatgaggtaaataatagtcagattaccatattaggaaaagaggttaaggttgttgtgcgaaaagaacctaagctaatttttctataaagtggaggttacaatggataaaaaaacgacattaatgtatggttctttactacatgatataggtaaaattatctatcggagtaatgatcatgcatttgcaagaggaacgcattcaaagttaggatacaattttttatctcaattttcagaatttaaagataacgaagtgctcgatagtattgcttatcatcattataaagaacttgcaaaagctaatttagctaatgataatacagcttatattacctatattgccgataatattgcgagtggtattgatagacgagatgttatagaagagggcgacgaagaatacgaaaaacaagcatttaattttgataagtatacacctctatatagtgtgtttaatattgtgaattctgaaaaattgaaacaaataagtggaaagtttaaattttctaatgaaagtaatattgagtatcctaaaactgagaacattcaatattcaagtggaaattatacaacactaatgaaagatatgagttatgatttagagcacaaattaagtattaaagaagatacatttccttcattattacaatggacagaaagtctatggcaatatgtgccaagttcgacaaataaaaatcaattaattgatatttctctttatgatcatagtcgtattacatgtgctattgctagttgtatatttgattatttaaatgaaaataatatacataattacaaagatgaattgtttacaaagtatgaaaataccaaagaattttatcaaaaagaagcttttttactacttagtatggatatgagtggtattcaagattttatttacaacataagtggttctaaagcattaaaaagtttaagatctcgtagtttttacttagaaatcatgcttgaggtaatcgttgatcaattactagaaaaattagaattaacacgagcaaatcttttatacactggtggaggccatgcatatttattagtctctaatacagataaagggaaagaaaaaataaatcaatttaatactgaattaaaaaattggtttatgtcagaattcactacagatctctcattatcaattgcttttgaaaaatgtagtggtaatgacttaatgaatactagtggtaattatagaaatatttggcgtaatgtcagcagtaagctttctgatattaaagcacataagtattcttcagaagatatattaaaattaaatcattttcattcatatggggatcgagaatgtaaagaatgtttaagaagtgacatagatattaatgatgatggattatgcagtatatgtgaaggaatcattaatatatcaaatgacttaagagataaatcattctttgtactgtcagaaactggaaaattaaaaatgccattcgataaatttatatcggttatcgattatgaagaagcagaaaggttagcacaaaataataatcacattcgtatttacagtaaaaataaaccttatattggtgtaggaatatcaacgaatttatggatgtgtgactacgactatgctagtcaaaataaagatatgagagaaaaaggtattggaagttatgtagaaagagaagaaggcattaagcgtttaggcgttgtacgtgccgacattgataatcttggcgctacatttatatcaggaattccagaaaaatataattcaatttcaagaacagctacattgtctcgtcaattatcattattttttaaatatgaattaaatcatttattagaaaattatcaaattacagctatatattcaggtggcgacgatttatttttgattggcgcatgggatgacattatagaagtaagcgtttatataaatgaaaagtttaaagattttactcttggtaaattaacaatgtctgctggtgttgggatgttcagtggtaagtatccaatttctaaaatggcttttgagacaggtctacttgaagaagcagctaaaactgatgaaaaaaatcagatagcactttgggtgcaagaaaaagtatataactgggatgagtttaaaaagtatatcttagaagaaaaacttctcgttttacaacatgggttttcacaaacagatgaacacggaaaagcctttatttataaaatgttagctttactgcgaaataatgaaactattaatattgctcgcttagcctatttattagcaagaagtaaaatgacagaggaatttacatctaaaatttttaattgggctcaaaacgacaaagataaaaatcaattaattacagctttagagtattatgtttatcaaataagggaggttgattgagtatgatattagctaaaacaaaaagtgggaaaaaaatagatttaacttttgcacatgaagtagtaaaaagtaatgtaaagacagttaaagataaaagaggtaaagaaaatcaagttttatttaacggtcttacaacaagcaagttaagaaatttgatggagcaagtgaaccgactttatactattgcatttaattcgactgaagatcaattgaatgaagaatttatcgatgaattagagtatttaaaaattaaattttattatgaagcaggtcgagaaaaaagtgttgatgaattcttgaaaaaaacattgatgttcccaattattgatagagtgatacaaaaagaatcaaaaaaatttttcttagattactgtaaatactttgaagctctagttgcatacgctaaatattatcaaaaggaggattaatatgtattcaaaaattaaaatttcaggaacaattgaagtagttactggtttacacatcggcgggggcggtgaatctagtatgattggcgcaattgattcccctgtagttagagatttacaaactaaattacctatcatacctggcagttcaatcaaaggaaaaatgagaagtttattagcaaagcattttggcttgaaaatgaaacaagagaatcataaccaagacgatgaaagtgttttaagattattcggttcaagtgaaaaaggaaatattcaaagagctcgtctacaaatttctgatgcattcttttctgaaaagacgaaagagcattttgcacaaaatgatattgcttatacagaaacgaaatttgagaatacaattaatcgtttaactgcagttgcaaatccaagacaaattgagagagtaacaagaggatctgagtttgactttgtatttatttacaatgtcgatgaagaatcacaagttgagaatgattttgagaatattgaaaaagcaattcacttattagagaatgactaccttggtggcggcggtaccagaggtaacggacgtatccaatttaatgatataactatcgagacggttgttggagaatacgacagtacaaatcttaaaattaagtaggtgaaagacattgacaacaaaagtatttaaactttcttttaagactcctgttcattttgggaaaaaaaggttgtcagatggggaaatgacaataacttctgatactttgtttagtgcgttatttattgaggcgcttcaattgggtatagaaactgattggttattaaacgatttaatcattagtgatacatttccttatgaaaatgaaatttattatcttcctaaacctttgataaaaattgaatctaaagaagaaggcaaccataaagcatttaaaaagttaaaatatgttccggttcatcactataatcaatatttaaatggtgagttaagcgctgaagatgcgacagatttaaatgatatttttagtattgggcatttttctctacaaacaaaggtttcattatcagcacaagaaattgattcaagtgctgacagtgaaccttattcagtgggaacatttacttttgaacctgaagctggtttatattttattgcaaaaggatcagaagaaacccttgaccaattaaaagatattatgacttcattacagtactcaggtttaggtggtaaacgtaatgcaggatatggacaatttgaatatgaaataataaataatcaacaattatttaagttattgaatcaaaatggagaacattctattcttttatcaacggcaatggctaaagaagatgagataaagagtgctttaaaagaggcaagatatattttgaataaacgttctggtttcatacaatcaacaaattattctgaaatgctagttaaaaaaagtgatttctatagcttttcttctggttcagtttttaaaaatatctttaacggtgacgtttttaatgttggacataatggtaaacacccagtctatcgttatgcgaagcctttatggttggaggtataagtatgacaataaaaaattacgaagttgttattaaaactttaggtccagttcatattggtagtggtcaagttatgaagaaacaagattacatttatgatttctacaattctaaagtttatatgattaatggaaataaactggttaagtttttaaaaagaaaaaatatactcgatacatatcaaaactttttgagatacccaccaaaaaatccaagagaaaatggactaaaagactatttagacgctcaaaatgttaagcaaagtgaatggaaagcatttgtgagttattctgaaaaagttaatcaaggtaagaaatatggaaatatacggcctaaaccgctaaatgatttacatttaatggtaagagatggacaaaataaggtgtatcttccgggaagttcaatcaagggagctattaaaacagcacttgtttcaaaatataataatgaaaaaaatacagatgtatatagcaaaattaaagtcagcgattcagagcctattgatgaaagacatttagcaatttatcaaaaaatagatattaataaaagcgaaaaaccaatgcctttatatagagaatgtgtagatgtagatactgaaataaaatttaaattaaccatagaagatgaaatttattctattaatgaaattgaacaaagcatccaagatttttacaaaaactattatgacaaatggttggtcggtttcaaagaaacaaaaggtggaagacgatttgcattagaaggcggtatgcccgatgttctaaaccaaaatattttattcttaggagctggcgcaggatttgttagtaaaacgacacattatcaattaaaaagtcgagaacaagcaaaacgagattcttttgatattttaactaaaaaatttcgtagaacttatgggaaaatgaaagaaatgccttctaacgtaccagttgctctaaagggtacaactaatcaaagtcttcatgtttcatatcaacaaggtatgtgtaagattagttttcaagagttaaataatgaggtgctataatgaaagtactatttagtccaataggtaactcagatccatggagtaatgatagagatggtgcaatgcttcatattgtgcgtcattataaacctgatgtagtcgttttattttttactgaaagcatttggaatggtaatagaaatatacctggacgtaaaaacttcgattgggaaaacattgtttcaaaagtatcatcgagaacaaaagtggatataaaagtggatagtattaaatatgaaaatgattttgatagctataaagatatatttcacttttatataaatgagattagaactaaatattctgatgcagaaattttattaaatgttacaagcggaacaccacaaatggagtcaactttgtgtttagaatatatttctaatcctcataatatgaaatgtatacaagtttcaacacctgctcctattgaaggacctaaacgttcatttgcgaaacttgaaactgtgactgaagatttaaataaagttaatgctaatgaaaaaatggcttctaatagaagtaaatcaatcaatattattagttttagagaagtgatggtgcgctctcaaataaaaagtttagtgaataattatgattatgaaggtgcactgaatttagtaagtgatcaaaagtcttttcgtaatggtaaactattaaggaaaagattattggaattaacaaatcagattaaaacgcatgaagtttttccagaaattaatgataagtacagaagtgttgctttaaaaaaatcattattccattatttattattaaatatgcgatataatcgtcttgatgtagctgaaacgttaataagagtgaaatctattgctgagtttatacttaaaacatatattgtgggtcattggcctactctaataattgaaaaagatgataaaccttatttaaatgctgaagataatttatcttttatttataaatataaattactattagaaaaaagaagacagaatttggatgtttcaaggattctaggtctacctgcgtttatagatatacttacagtattagaacctaactctaaactattaaaagaagttaatgctgtaaacgatataaatggtttaagaaattctatagctcacaatttggaaacattagatttggataaaaataaaaattataagaaaataatgttatctgttgaagcaataaagaatatgttgcatatctcatttcccgagatagaggaaaaagactataattatttcgaaagaaaaaacaaggaatttagagaattattatgataaataaaattacagtagaattagacttaccagatagtattcgttttcaatatttaggaagtattttacatggtgtgttaatggactatcttcctaatgatattgctgatcagctacatcatgaatttgcttatagtccattgaagcaaagaatatatcataaaaacaaaaaagtaatttgggaaattgtttgtatgtcagatcgattatttaatgagatagccgagctattcacttctaaaaacaggctgtttttaaaatattaccaagtttatattgagatttattcttttaatattgagaaagtaaacgttcaaaatattatgaatcaactcttagaaacagaggaattgaatcgatatgtaagaattaatatacagacacctatgtcttttaaatatcagagtaattacatgatttttcctgaggttaaacgtttctttagaagtattatgatacaatttgatgcttttttcgaagaatataaaatgtacgataaagaaacattagattttttagaaaaaaatattaatattgttgactataaattgaaaagtacacgatttaacttagaaaaagttaaaatcccttcatttacgggagaaatagtgtttaaaattaaaggacccttaccttttctacaactaactcattttttattgaagtttggcgaattttctggatcaggtatgaaaacaagcttaggcatggggaaatatagtataatataactagagtatagctgaaatttagttgtcaaaaaatgtgacattctgcacttatagtacaagtgatttgtcactatttttgacagtaaattttgcctttgaactattgatttgataggctttaaagagctatctaaattcgataactaccccgtagaagaggggacgagaactcttctaagacgcgatatgattctaattggtcttcattcgataactacccccgtagaagaggggacgagaactgatatactcctttaccatgtattaattctggaccactattcgataactaccccgtagaagaggggacgagaactcatattcgatcgtgtatatcaaaactttatgcattcgataactaccccgtagaagaggggacgaggatctcatcttgatgatcccaattggcttggttaaaaagaaatcgataatcctcgtagaatagagaaaaagtattaaaaatatatttgatttgataaaatattctgcaaaaaagaggaacaaaaaatcaagatttaaactgtaattcattattattgaaattaatcgacattcaatttctaaataaacagaaacaaaaataactttcatataaataatttctttgcgattaagttggaattagaaatactaaatacaaataacagcgaatgaaatgcatattattgaggaattggatgtgtagtgcaatttcgagagttactacttaagaaaataaaaagaagaaaacaaacaataagaattaaatctgaagcaagatataaaagcaaatatttttgatacaaccacattagtaaatactttattaattagtatacgactgaaagcgaagtaacagctaacaatgctccagatatagacattagtgttacgaaagaataatattaccatctagaaaatgtaattttttaaaaatctgaagataaagtagattactttgtgagttttcatgttaagaattctgaacttggagacgtagtataaatatagcttagtagaaaatgccaccggagctgtagctgagattgactatcaagaattaactaaattaggttattacccatcaacaaaaatccaagatttaacactgtctaataatagtgcgaataatgaagtttaaaagtaaacaactggtaatagcgaatcaaactaaagtaatcaattacagaattcaagtactactcaagcctcaagcaaatattgaaactcaaacacaagttaagaataatacactgcctgaaacagatgaacagtctaatgccgattgagtccaataatagcctctgtattattagccacacgattattatcaatatttaaataaagttaatattaaataataaaaatccttcaaattatttgttgaaaaattaataactttgaaggtttttagcaaaatcactgatagggagaggcttatcataaatgatgaggttaaatactaaaaataatattaaatacattagtaacatctcagacataattttgattattagaaataaatttaaagcccacagttagcagttgataaatatagtgtctttagtaattaaaataagggattggggtatttagaatgattaaaaaaatttcacttcaaaacattgcgacttatagaaattatgtagaaataaaacctaaaaaaataaattttatttatggtagtaatggcagtggtaaaactactatttcgaatttgataggaagatttaataagtccgacgattgtgttattgaaactaaaaaaaatagtaactcaagtattttggtttataacaaaaaatttgttgaaaaaaactttagtcagtctgatatcggtctaaagggaattttcactttaggagaaaattccataaatttacaagataatttaaatgaattaagaagaaaaatacaggttaatgaagaaaatatatatattaaagaaaaaactataagaggctttgaagaagaaattgaagaaagaacaaatataattaaagataaaatttggaatcatcaaaaagagattagtaaagactttccagaagcctttgttggctataagaataacaaacaaaaattcttaaatcagtgtataaaagtttatgaagaaaatattttagaaaaatcagaggaaatcttaacaaatagtttagaaaaattaaaagaaaattataatataagtttttctgatgatattaaattatacgaagtgtttaatgttaatgatacggaaaagattctggaaatagaaaaaacgaatttgatagaaaaagttattgttggaggcaatgatagtctaatcggacaatttatacagtcacttaaaaatagtgattgggttaaacaaggtttggattatttggactactctaatcatacttgcccattttgtaatcaaagtatttctgaaaaactagaacaagaaataaaagactactttaacgaagagtatgaacaagatttaaaaaaaataaaagaaattaaacaagtatatagcagttgttttgaaaagattgaaagcaatatgttgtttatattgaggaagtcaataccctatcttaatacaaaattacttagtaaagagtttgaagtacttgagaaacaatatgaagttaatcaaaaacaattgaaagaaaaactgagaaatccatcacagaaattgaaaataaaaagtctggttcctaaaattgaaaatattaatgaaataattagctctctaaatgaatcgatcgaaactaataataatattattagaaataaagagagagaacaaaataaatttaagaaaaacctatggatatatattgtaaataatatgaagcaagatttaaaagagtatgttaattttaaaaatggaaaatttaaagctattgctaatattcgacgacaaatttctggtttaaaaaatgaaaataaaaaaactaataaggaaataggagaaatagaaacaaatattactagcgtagaacctactgtgaaaaacattaatgaaattttaaataaatttgatttcaaaggatttaaacttcaagagaatagtaatgcaaaagggacatacctcattgtaagagaagacggatcaaatgccaatgaaacaatgagcgaaggtgaatataactttattacatttttatatttttattacttagtttatggtagtcacgagagtacaagtttaacttcaaataaaatcgttattatagatgatccaatttctagcttagatagtaatgtattatttattgttagtactttagttaagaatttgataaatgactgtagaaataataagaatggaatacaacaaatattcaatcttactcataatatttactttcataaagaaatcacttttttaggaagtagagaaaggttttcgcctaatgaagtaatgtatggaattattagaaaaaaggataatataagttattttaatacttatgagaataatcctatagaatcttcatatcaattaatgtggaaagaacttaattctgaagaaatgtcaccaataacatcatttaatactatgcgtagaatactagaatattattttaatattatagggggcatggattatgaaaaatgtattaataaatttgacggtatagacaaaatattatgtaaatcacttatttcaggaataaatgacggatcacattttataagcgatgattttgttattacctttgatgaagcaagtatgagaaattataaaagagtctttaagttagtctttgaaaaacttggacatatccaacactttgaaatgatgagtaagaataagattaaataatttaagtaggtagttggttaatgaaatatgaaaaattcgactaataaatgaatgattaaagtatattcattggactttaatatgaaaatatacaattaatgtacttaatgtaaatggcggttataaaatgtaggaaaatggcgaaatgaaaatgctgtttttcctacattttttcttttttaaattatataatcatgtcttaactcaatcttcgattggaggttatttgattgagacatgacatttatgaaggagtgctattttacattatgaaaggtattaaaccaaattatgctgagcttggtcgacaatataattgtgatccaagaacagttaaaaaatattatgaagcaggaaaagaaaatgaattagaacgattgaagaagagacaacaaaataagaaagcatcaaaactagatccatttaaagaaattattaataaaaaattgaattaggatgtacagctatggccatttttaaatatatagagaaaaagggttatgaaggtaaatatactattctacgagaatactgtaaaaataaaaaacaaaatgagactaaaaaagcaactatacgcgtagaaactaatcccggtatagctgctcaagtagactggaaagaagatatggtaatgcatgataagtttggcagaacttatcaattcaacatctttctttacgttctacactattcaaaaatgaagtatatcacattaacttgggatagaaaacaagataccttatttgaatgtttaaaagacgcttttgaatacaccgaaggggttccaaaagaaatctggttcgataatatgagaactgtagttgatcgacgagaacacaatataaaaaagtcgtttttaataatttattttatcaatttagtaaggatgccaactttgaacctattgcttgtagaccctatcgccctcaaacaaaagggtctgttgaatcattagctaaatttgttgaacagcgcttaagaccctatgattatgaattttatgatgctgtagaacttattgagctagtagacgatttatgtcacgaattgaatcacttagaaatttcacaagcaacagaacaacgacctatcgacgttttcaattatgaagaaaaagaacatttaaatttttttaatgccaagttactagatacttacatcgaaaatgagtgtataagaatcgtttctaaagaatcgatgattaactttagaaaaggtaaatactcggtacctactaaatacattggtgaagaagtacaagtgatattcaacaattctactgatgaattgctgatttattatgatggtgaattaataagacggcataatctatccgaaagaaaatttaattatatcgttgaagatatgagtgaaatattaaaatcagatgtatttaaacataaggatgacaaagaaattcttacgtatatagaaaattcattattactgtatgacgaaatttaggaggactttcgatgaatacgaaccatcaaaaattactcaataactttgaaatattaaaactaaaaaaattcaaggattattatccaaactatattgaattactttctaaaaattagaaatctttaactgaaatattgattgatttaacggaaaaagaaatagaataccaatcagaattaaaatttaaacgtgctgtgaattcagcacgtttccctaaaataaaatatttacatgattttgatttcatgtttcaacctagtataaatcaacaagaaatactcactttaaaatctatgcattttttagaagatagtataaatatttgtttcttaggtaatagtggtgttggtaaaacgcacctagcaatctcattaggaatagaggcatgtaagcaaaatataaagactagattctatactttcaaagaattaatagacttattaactgtctcagattccaaaggaatcattaataaaacattaaaacaattaagcagaatagagttacttatcattgatgaaattggttatactcccatcaccaaagaacaagctgatttattctaccagttaatgtcactaaggtatgaatggaaatcaacaataattacgactaatattccattttcaagttggggagagtcatttagtaataagattgtatcagcagctataattgatcggttagttcaccattcaaaagtatttaaaattactggagaatcatatcgattaaaagattataaaaccgaaaaatcattaaatatacgacaatcttaaaccgctaaaaaacgacattttcaaaccgccataaaacagcatttttaaaccgctattgacacttaagaaaaaatatgaattttactatgttagattgaatgattatgattttacaaatgtgttaaagtgtatttagtgataaagaaagagagtaaattaaagtcgatatcaacctattctttttatgagggacatttatgtgagggataatgccgaccatagagttgttaggataattgttgtgtagaattccattttttataaggagtagataaccatgagcaatttacatttgtccaatatacaattaatatttgacgatatgcgtgataaggattatattattgattcatttaaatttaaatataaaaatgaaaattatttagtctttatccgcagattcaaaggaaaatttattaaaagaataaataaattcgcgaaagttcaattaacattttataaagagtcaactatgaaaaattccttggtagttgaagcaaataataatggattaatagtaaatgattacaatatgctatataatttttttggcatcgaatcatctagttttggtaaaggtctatttcctttttatgagagtcttaatgaagcaattcctaacgaagtaaatcttaattcaagtaaagaaaaaaatatttctttatcaaaagaactatataaagatgatatcaaagaaatggataaaatttattgtacaggtgttacacgattatcagaaggtcgaaaaagatcagaaagaagaaatgaaaaagcaaaaaggttaagacctgccctttatgagttttttgatgaccatagtattacatttaacttttcacctcatgaatggaaagaaaaatctgatgaacaaatcaaaaaggatgctgtaaacagactctaatggtaataaatatatataagtaattaaattttatttattgttgatttgtattttttgctaagttaatcataaaaagcaagaagtactatacatataaatttgatattttgaaatgtctacacctattagataaattctatgagagtagatgttgttaatttaagaaagtagtcgattttattatgacaagaggaagaaaatcgtttagttcagagtttaagttacaaatggttagatttcattcctaggtgttaggaaaatggataaagcaacataaaaacatgggtacattcaatcaccaagataacttatcagatgaagaaaaagagctgattaaattacgtaaagaagttcaatatataaaaatggagaacgatattttaaagcaagcagcgctgatcatgcgacgaaaatagaagtcattcaaaaaaatgtacatcaacattcagtaccagcaatgtgtaaagtcctaaaaataccaagaagtacctattataattctataaaaagaaaagatacaaaaatcatccaaaagaaactaatgaaaaacgaattaaaaatcatttgaatcgcgcttttaatagagagcaaccaatggagacattagtaagtgatttaacatatgtaaaagtcgtaggaacatggcaatacatatgtttatttatagatctatttaatagagaaattgttggttacagtgcaggaaaagtaaggatgcaaatatagtatcaaaagcaatcagcagaataaatcataatcttgaacaaatcaaactattccaaaccgatagaggcaaagaatttaataatcatttgatagatgaagtcctagaaacctttaaaatcaaacgttcatgaagtaccaaaggttgtccttatgataacgcagttgcggaagcgacgatgaaagcaatgaaaactgaatttgtaaaacaaatgtaatttgaaaatttagaacagttagaaacagaattatttgattatgtaaattggtacaacaattttagaccacattcttcattaaaatatttgacgtcagtggcatttaaaaatctacacatgaaaactgtctaaaaaatgttgacataccatagtaaaattaaaggagttgaaagaaaagtttaatatttcacaaactgagctgtctaaaaaaaactaatatatgtaggcaaactataaacacgttagaaaatggctcatatttaccgtcgcttaaaaccttaaaaaaatatcattattctttaatactagtatagaaagcatctttatatttgaggaggaagatttatgaacagaaatcttttaaccattttattattgatagggtatacgtatttaatatttaactttctaacaactgaatactccttggcgccaagaatattctatacattgaactttattagtttgtccttaatattattagcaaaggctaaaagtaagaaattaaataaacacacacacttccttgacgaagtacaactagttttagaaaaaagatattccactataatgtatatattgaatatcgcgttagtagtttcctttatttcattcttaactggttttatatatttaagagaagaatacccacaatttatcctttattcaagtgtattgctagtaatgtctttctattatattaaactattctatgaagataaaaataatattatttatatgaatagaaaaattgtggattttaataactcagaagtagaatgtcagttacagttagatgatggagaaaaaaatatattattgaaacaacttgataatttttataaatcgaccattattttattgtttattaccgaaataatgttgatgttttactccataatatcatctaactatcaaacagtgagtatggttttaattgctatagttattttcatttcatcttcactactaattacaaagaatgtatatacaaatcgcaactaattaataatggctctatgtcaaattggactgatgcattcaataaaggaagttaggcaactaaacattgcttaacttcctttttactttttagagcgtaaagttttaaacataataatatacgattgcgcaaatgattgtaatttccataaccaaaagacgtgcgtttaattaattttattttgttgtttatcccttctaaaggaccatttgataaattgtaataatcaaatgtattttttatatagtatacatgtttgttaagtgtcttaattgctcgttggacaactgaatgcgtttgggataatggcatatgttttaattcgtgaataaagccttcataatcattatgtttaagtttgaatcatagctgattgatatattggtaggcgtcatttagtgagtcatcttgatctaataaatacttaatgatacctttttatatagaaagtaaagtagcgttattctaacttatttagtttataccataatataatgcctctagaataaaacgctagtgactatggttttcttcaatttgataaaattcaattgcattgcctcttaatataccattaatcgtgtcagggtcaatattactgtttttaatatagtctacgccgcgtgtatatttttcatcttggaagtaagggaagtctgaccccatcataaatttatccttaccaaatgtctcaatagagttaatcaatgaaggttcgtggaagtttgctgtatcataccaaaattgtcgattcaatacttcataaggatcaatattaaaggcattccaatcttcataattgtctttaatacgagtcatgaagaatggtaaagcgccacctaaatgtgaaatatggaatttaatatttggatatttttgtggaatttcatttttaatcaattgtaatgtaataaaggtagactctaacggtgcaccaataacccattctaattgatagtcattgactaacggactttgagcgccacaacctgttgggtgaatataaagtgtagcattgagctcattcatcgctgcaaagaaaggttcaaattgtttatcagcaacagagaccttatcttttactatagttggaatggcaatgcccacaaattcatcttttttcaaaagggcttgggcttcttcaatagcttgatcgacataaggtagtgagacagcaccatatgccaagaaacgatctggatattgttgtactaatctttcatataagtcattaatttcttgagcactttggtgagcttcttctttagtaccccattgtggagattgtggtgtcgcagaaataatttgtaaatctacgccagcatcgtccatcattttgaagcgtttctctaaatcttctttagacgcagattgattaatccctttagcaacttcagtaccttgactacctaatttgccaagtttgtctaaatagtcttcattccataaatgtgcgtgtgtatcaatcgcttttgtttcagtcatattaacccctccattaaaaattgtcattcataatttgcttattgccaatagattatttattacgagttaagcttaacacttctagtaagcttaatacatttaaaaagaaaaatttagaagcagcttgtgcacctttataaccatgcccagctttataatggttataaatagctgtacccataacaatattaatcataatcgtaccaacaactactaattttttccctaatttaccgaaaatagaagtaaataaaagaagtgaaccaatcatttcgaaagcgccagctaacctcattgatctacgtgataaaccaaagccttgttcgaattgttgagccatttcatcactattttgtacttttggtaaactacttttaaaaatttcactacctacatatgtgttaatgacgtgtcttaataacattttaaaatcctccaattaattactgtttgcgaataaagaatgcaatgatagtacctataaaggcaatcaatgcgacgacatagaatgtaatatctagaccatgaataagtccttgactaccacttaatgaagaggttttacctaatcctgtcatcaatgtgaccaagataccagtacctattgcagctgatacttgtctaatcgtattattcatggctgtaccatgtgcaatgtattgacgtggcaaagcatttaaagcttgagttgtcatgggcgtcatgatcatagcattacctaacatggtaactgaaaatgaaataatcacatatagttgtgttgtattttgactaaattgagccattaataatgcgccaatcataatcgttagcatccccataatactcaagatacgtccaccaattttatcgaataatttaccagtgacaggcgataacagtcccataattaacccgccaggtaataaaataagtcctgactctaacggagaccatttcatcatcgtttgcatataaattggtaagattgttaaattccctataaataacatgaacattagtacaattaaaatcattgccactgaaaagtcgttatatttaaatactctaaactctaacaatggcgattccagttttaattgtcggaaaataaataccgttaatataactatggcagcaataatagttatataaaccattggatgtgaccaacctaagtttcctgctgtactaaaaccaaatagtaagccgccaaagctaaccgtcgataaaataatggatagtttgtctaagtttggtttacttagttctgttatatttggcaatgatagatacccgaatacaaaatcaatcatacctattagtaatacgattaggaacagatagcgccaatcgaaaatattgacgaaccaaccagctgcagttggtccaatcgcgggtgcaaaacctattacaagaccgaacattcccattgccattccacgtttttcaggtggaaacataatgaaaaggagtgtctgtgtaagtggcatcagtataccagcacctaaggcttgaatactacgccctactaataacattggaaaattgattcctagcatacaaataaatgaaccaatcattaaaaagcatgttgcattaaaaaataaagaacgtaatgtaaaacgttcaattaaaaaagctgtgataggaatcataatcccattgactagcataaaaattgtcgtgagccattgtgctgtactacttgataccgtaaaatctttcataatttctggaagtatcgtagtcatcaaagtttgattcagcacaccaacaaaagcaccaatcattacgacagctataacacggttccgttgtttcaaatctatattaaaggcatatatattcctcaaattttgacgcctccccctcttttaagtggaacctactatcatttattttatacggaatgggttccgtttgtcaatttaataactcgagggtatgataataggtatctgataaaatgaaaaatgcaataatgaaggaggtagtttatataaattttgaaggattagaacaatatttaaatggtgataatacaagatataacatgcttagtttagatgtgcttaattattatttaaaacaatatgtgttaactatcccgttcaaaaatatggatgttcaaaatgggatgaaagtttctgcagaagtaaaagatatttaaaataaagtagtgaaccatcaacacggtgacttttattatgaaatgaataatttctttaacgtgtattttgaatataaaggatttactgtaaatatagtttcttcaactatccatacccatggtggtggaaaaagcttaaaaggttctcacgtgtctttaatcatacctattgatggcgttgattatgttacaggtgccggctttggagacttgccatttagtgtcatgccaattgttcaaaaagatattagtccagtcattcatgatatgaacggtgatttccatgcaatgtacgtcaacaattatttattttatgttcgaaaaatggggaaagataatgacaataactgggatcacactatgaagcggaattaacacctcgtcatattcatgactttgtttacaatattgaatataatgaaattaattctaattctatttttgtgaaacgcttgttagtaacaatgattaaatctttttggtcgtgctacaatgttacaaaataatataactttaactaagcaacaaaagaaagaataatatgatgtaacacctgagaatgacagacaatttttagaagaagcatttaatttagatgttaaaattgatagattagaaagttaaaaacaacgttaaaaagaggaatataatggaaaaaaatcaacgaaaaaaacgcagtgatgccgaatataaccaacagattatcttaactacaatggaagatttactagaacagggtgaagatataagtgctaagaaaatgtcagatattgctaaaatatcaggtgttggagttggtacattatatcgtcattttgaaagtaaaacattgttatgtcaggctattatggataaaaaagtcgatcaaatgtttatagaaatagaagatgttttagcggaaaatacacagtggcccgtgcgagataaaatcaatgttatattaacaaagtatctagatttaaaagaagcaaatttcacaacattaaattttatagaaaaatccagttcacactctagttctgtaattaatattccattctttgagcgactaaaaaacttattaattcaacaattcgaaaatgttaattccatagcagacttggattttaaacttaatctaatgctcaatgcattttcttcagatttttattattttgtaaaacataaccaaaaattaacaaaacaacaatttttagataaattactagatttatttctaaaataatatgttctgaaaaatagaagtattttttgaaccactaaataacgcgctattaaatggcttcgctatgcccgtctaacacattagtgtaaaattttataaattgaatatttgatgacgggtcccttcctagggtgctctctcagacaccccaaccggcacattattgtaagttgacttttcgataatattaaagatttaaaataataaagctattaattatgattagtggtttcaaaatgttattttttagaggtttaagattgccatgaatttagttttatttgttctcatgttaaagtttctttatatcaacttttattttagtaaacctaaaagagtagcaacttcaaaattcgcatttatagctaaaaataattttgaaatgcacatgtttaaagaatcaaaagtgtgcattgttaaatcatcattttcaattaataaggattattaacagagagaagtgacttattttggaatataaatcttacaacaaaatgagtaataatattttatctatcttgtcgagtgaaaaaaatttcgataataaaatggtagtctcaacaggtagttacattttgtctgagttgccatgtattgttgcctataaaaataatgatatcgtggggctactaacgtataaagtttatgatgagtatattgaaatcatttctttagatagttttgtagagaacaagggtattggtagtcatttacttaattatgctgaaataattgcctcagatatgagtaaaagaagtatcagtgttattactacaaatgaaaatattaaggcactctatttctatcaaaaaaataaatatagaatcacagacgttatttttgatgctgtaacagaagctaggaaaataaagccatcgattcctgaaatgggtgaaaatggcattgaaattagagatgaaattgttttgaggaaatgtttgtaatgtataaatatactcagctttaaatcaccctagttcataccaaaaagtctttaacacaaacaaaaaaggaggaaacttaaattcctcctcaacctttattactcatactataattcaattttagcgtcttcgtccatttgggcttcaaattcatctagtagtgctcgtgcttctgcaattgattgtgtgttcatcaattgatggcgaagttcactagcgcctcttatgccacgcacatagattttaaagaatctacgcaagctcttgaattgtcgtatttcatctttttcatatttgttaaacaatgataaatgcaatctcaacagatctaatagttccttgcttgtgtgttcgcgtggttctttttcaaaagcgaatggattatggaaaatgcctctaccaatcatgacgccatcaatgccatatttttctgcaagctcaagtcctgtttttctatcgggaatatcaccgttaattgttaacaatgtatttggtgcaatttcgtcacgtaaatttttaatagcttcgattaattcccaatgtgcatctactttactcatttctttacgtgtacgaagatgaatagataaatttgcaatgtcttgttcaaaaacgtgcttcaaccaatctttccattcatcgatttcatagtagccaaggcgtgttttaacacttaccggaagcccacctgctttagttgcttgaataatttcggcagcgacgtcaggtcttaagattaagccggaacccttaccctttttagcaacatttgctacaggacatcccatatttaagtctatgcctttaaagcccattttagctaattgaatactcgtttcacggaactgttctggcttatctccccatatgtgagcgaccatcggctgttcatcttcgctaaaagttaagcgtccgcgcacactatgtatgccttcagggtggcaaaagctctcggtatttgtaaattcagtgaaaaacacatccggtctagctgcttcacttacaacgtgtcgaaagacgatatctgtaacgtcttccattggcgccaaaataaaaaatggacgtggtaattcactccaaaaattttctttcataatatatttataccctctttataattagtatctcgattttttatgcatgatgatattaccacaaaagcctaacttatacaaaaggaatttcaatagatgcaaccatttgaaagggaagtctaagagtagtctaaaataaatgttgtggtaagttgatcaatatacaaatcaaggattatcgtattagattgttcattattaatgatacactacttattaatatgattcagaattttctttagctacatatacagtaatgtgatttatacgttatcttataacaaagacaaatttataaaggtgatattatggaagatttaaaacattctttaaaaggtttaggttggtgggatttattttttgcgatacctatgtttctactattcgtgtatctgccgaattataattttataactatatttattaacattgttatcattattttcttttccataggtttgattttaactacgcatataattatagataaaattaagagcaactcgaaatgattcattaatacgaatgtgattaaacataaaactgaaggagcgattacaatggcgactgagaaagatgtaaatgatttatttttaaatcatgtgaattcaaatgctgttaaaactagaaagatgatgggagaatatattgtttattatgatggtgtggttataggtggtttgtatgataatagattattggtcaaggcgactaaaagtgcacgtcatcaattgcaagataatacattaatatcgccatatccaggtgctaaagaaatgatattaattccagacattaccgaagcaacaaatctcactaatttatttgaatgcataaaaaatgatttgaaaaagtgaagttcgaatggagagaattaagcacatcgacaaatgatcgcatattaaaagaagagtgacggtcactcttctttatgtgcatattttattttgtctgttttgttaacaagcagcagtgtaacaaatatgagtaaggataaaatgagtataatatagaaaccgaatttatcattaatttcattaatccatcttcctaaaaatggagcaatgaaactttgcagcaacaatgaaattgacgtccatatcgtaaatgagcgaccgacatatttatctgaaacagtgttcattatagctgtattcatataaattctgattgatgaaattgagtagcctagtataaatgatcctatgaataagtaaaatgctgagtttatccaaataaatagtgctgaatttatgactaatatgaaatataacaaaaatatcaatactttagttgagattttcttcgaaagaatagctgaaattaaacctgcacataatcctccaatgccatataacatatctgaaaaaccaaattgtacagacgaaagttttaaaacattatatacatatcctggtaatgatatgttaaagatcattgtaaacaccattggtatgattgaaataactccaaaaataaatatcatcatgttgtcttttaaaaatttccatcctaataaatattcttgcaataagctatttgttgattcttcctctgaatgagttggtttatctacatgcaatctaaataacataaaaatgctgattagaaacatcattatagtcatcgctataattagagtgaatccatttatttcatataatattcctgataatccacctgcaataaacatacctgtttgcaaactaatctctaatagagaatttgcatctgtatattgatctggttttaatatctgtttaactaaacttctagatgttgccatatacgtagtccaacctatcccattaacaatcgcaaatccaatcactaaataggtctcaaagcctatcattacgagtgctatgacaatgagtaaatataatattacctgaagaagataggtgattaaaataatgtttcgtctattatatttatcggctagtccacctataataggagaagctaagaaaccggataatacatttaaagctaacataatacctaatagttgggagtcgttagttttgtcgattaaataccaattagcccctacagtactaattccaactccgaatgctgaaataatttcagctaaaaagaacaatctgaagtttttaattttcaacaaatcagtcataaatatcaccttttttcaatgcaagatttatatttgcgagctcttttataaattgagagtcgtttaaaatatcgtatggtttattgccttcgccaatcaaaaatctatagttagtaatattcataaactcaaatattaatttgaattggttgactaaaggttgtgctttggtatgcggattgtcgccacctatgattaaaatcaaatactttttttgtgacatgatttctttgaagttgtctatttgcgtatctcgcaatgactcggtccatctatcaatgaagagttttaaagacgcactcatggagtaccaatagagtggtgttgaaaaaataataatatctgattctaaaactttgattaaaatttgttcgtaatcatcattatgaaagttggcacctttgctatgacgattatctgtaaccttttcaatgttactttgatataaattcacaaagttgacatttaaattcttcaatagattctctactgcgatagctgaattgccatcttttctactacttccaaataaacaagtaatcatagtcataactcctttcgatttacctttataataatatttaatatattattattaaatcagaattcttagaatgtagaattcgataaaagtgaatcctaaaggaggtactactttgaacttaaacattttaaaatcatttttagtaactagtgaaacaaagaaccttactaaagcatcagaattacttaactattcacagtcaactgtatctacacatattgaaaaattagaaaagcaattagatgttaaattattttatagaaaaaaatatggtatggaactaacggaagaaggcttagcatatgttaaatacgctaaagtgattttagatagtaatagcgaatacgagagagaaataaaaggactttacaataagaaggtaaatataagtattaacatgcaagaaagtcagtatttgtatcgctactataataagattagtgaatggttagctgaacacccatatgtaaacttgaagtttaaatccgcacattctaatttctatattaaagaagaaattgctaatttcaaatcggatattagccttatcacagacgaaaagattattaatagtaacttaactgctattcctataactgaagaacgtttaatatttgttactaacaaagatatgaaagatttcaaattaaacgatattcaaaaccatacattacttgttactgaaaaagggtgtagttacagagaacagttagaaaagattctctataaatatagcttttcaacaaaacaaatgattgaatttctaggaattgagtcattgaaaaaacacttgaaaaattcagatgggattgcgctattgccggagtttattgttgcagatgaattacaaaataaaagtttgtttcaaatagatatcgatgtcgatattccgaatttagaaacaactttgataattaatcctgaatccagtaagcaagtactagaatcttttgtaaaagatgtctttttataaatattggtgaaaacttgtagttatggtgaaactcaaagataatcatttattggtaagggcatacgaacaattaaaatttccaaacaaggtacacgagtgcttctgaatttatcggcacgcttttacatagatcaaaagaacgcgcactaaaataatcattatatctatgtaacttacatctttgatactacagaagttcgtgcatttgttcaatcgtctcataaccattaaatgccactaagcacgacctgactgtttcacactttatgaaaatctttaaatagcgttaattatgaatgaagacatctataacatttatttatcttataaaatagtacaattacaaagcactacaacggcgactggactcaccttaaatcataacgacaaccgctaaaaattgatcgcaaaactaatcattaattgccatacttaactattttgaaaagtatcaatttcacattataaaattattgagtatctagatttattgttatacacaaacagtatttttgttatgatagagttaataaatataataaattgaataagtaactttacaaaactagaatgattcaattcaatcataattgtttgaaaatagaggtgagcaggtgaacgatatgttaattagtctcgtaatcccagtttttgctttgttagttattggtggtattatttgggcaattatagaaggtatagtacatatttcaaaaaagaataaagcaattgataatttttttaaccaagttaataaagtaagtgagacatataaattcgctactacttttttatttctaatcttggctacggctggtatttctcaattttatctatattatatagtatcagcgtttcttttttggcttgtcatatttacctttggtattgcaggtatcatttttttaatgccatatggcttatgcttcctaccactttataagcaaaaaaagaaaaaacagacatttaaaaaatacatggtttacactacgattggtttgtcaatttgtctaggcttatctctagttttagttcacactacgaaaatttatatggacgaaggtggcgtaagatactattacggtagttttgtaatgaaacaagcgggcggttatgcttatttagctttagcggtactttcaacgctgttaattgttgcgaaaaaagctacaaataaaaataaagaaatcgaaaccgtcgacaatacaaatataacggaaagataattaagggagtgctcattcaggagtgctcttttttgatgttcaaatttagttggtaatgaagaagcagaaacatttgtgagtggaaaataaaagttaagctgaaatcctatcgaacgtatctgtaaaacaaaaaattaacgccacaattttcatcgtaattaaaaacagacattctagtaacatgctttttcaaaaactaatctaataatacgtccatctataaaatatttctacgtactaaaaaaggcggagtaaatcgtccgcctcaatgcacacaaccgcatgttgtttttatagagtttctttatagaatgattcaagttttggtaacacttgatttacgtattctggaatatcatataaatctacgtgtgatgcatcttcaattttatagagttcgttgttgtcgcctgctgctttttcaacagcgtcaacgctatattcaatcgtgtctgcttctgtacctgcgattgctaagaatggttgtgtcaacaattcgtcaatatatgtgaaaggtgcaaatgttaatacttctgaaaaacttcttaataatagtttgtttggtgcgtttttatgttgaccacgtgcagttaaataataatcatgcccttgtaccattgttgaattttcaggcatagaatcatcaatttcttcaggcacatagccagtgataccataatctgcaccatttgcttcagctgtacgttgatctgcaacttgtgtcataaatgccagttgatcatctattgatactacatcgccaggacctttacggaataaagcgccaatatctaccatacttacagttgcaagtgctttaatgcgacgttctgttcttgctgcacttactgtatatccaccacctgcacaaacgccaagcgcaccaattctgtcattatccacaaagtctaatgttgtaagataatcaactgaagctctaacgtcttctgttctcgcaaatggatcttctaaatatctaggagagccttcactttcaccttgatgtgatgcatcatatacaaccgtaacgtagccgaattccgcaagtttctctgcatacatacctgcagtttgttctttaacaccgccacctgggtgacaaactgtaattgctggatattttttgctttcatcaaattgttcaggtgtatataaattcgctgctaataaatttgttttacttttaaaattaactgattgtttcatagattaaatgcctccatctttttatataagtcattcatttgttgtagatatttattactcttgtgtgtataatgccatactagagtatttaaatgtacaattcaattaacaaggaagcacatatgtgttttaatacacagttttataaaaatgggttttaaaagaaaggagtattattatgaatgttggggatttacgggttgttaaaacgagggcaagtattaaaaaggcatttatgaccttactttttgaaaaagattttgatactatttcgattaaagaaattactgaatttgcgcaaattgggagaaaaacattttatctacattatattgataaatatgatttactagatcaaatagtatcggaaaaattgatagaacttgaacaaatttctgaagccaaaaagagtctgggtatccaagaaggcacacagttatggtttgagtttttcgaaaataatagaacattttttatgaaaatttttaatatcaacaacgcttcaaattataagaaaaagctgcttcattttattgaagaagaatttaagaaaaaagttccgacacgtgttgctactgaaaaaggcttagactacgacttatatattaattttattagtaacggtattatcggactactagatatctatctaaacagcagtgaaaatacagaagaacaagaaaaaataacattgcaggtgtcgcgcctactatctttatacgatttaatttaaaactaagctatctattttgaatataattgcgtgtagcagatatagtatgtcacttcttgagagaattttattataatagttttatgagttgatattgcagtgacaagagctaaaaaagaattttatgtaattggcgacatgcaaagaatacagtcgaaaccattttatgagacgatttttaaaaaaatgtagaataacatacaaaaaagtatatagagggagttattttcatgcaaaatagaaatgattttatagaaaagttattagacagagctcaaattaaagaaggcatgcgtgtactggatataggttgtgcgactggtgaggtcactcaattaattgcaaaacgtgtgggggcgaatggtgaagtcgtcggtgttgatgtgaatgaatcattacttaaaattgcaaatgaaaacaatcaatataacaatgtatcatatcaatattctgatatatatcaattgccagaaactatggggcattttgatgcgattgttggtagaagagtattaatgtacttaccagatgctgaaaagtgtttacaaattttgaaatcaattttaaaacctgagggtatattatgttttcaagaaagtgatgctattaatgcaggtgttggtgcagatgcactatctttacatcaatcagcaattcaatggatttgggaaacagtgaagcaagaaggtggcaatattcatatcggtcaaaatttatataacttgcttcataataatggaatgcatgttgtagattattttgcagaggcagtgattcaaacgtcaatggacaatgatttagcatggcttgtagatgtaatgctaccaagaatgaaagcgcatggtgttattaatgatgatttttcactagatgagtttaaattaaaccttgaacacgaagcaatgaacaatcagtgtgcatttatacgtgacatggcgtttggtattatcggaaaagcctagtttaaaaacgctgaaagcagcatattatcatcgccattgttttaacttgtgaagttactaatggattttgaaaataacagcatttctattggctaatcaagtgatacttaattaccgagcaatttatacattttaaaaggagcaaaattgaataatgaagaaatttaacaactggatattaaatgcaataagtggatctcaaacagacaagaatgaaacaactgaagaattaaaaggggcaaaatttatcattttatatgcatattcaatgctcgttttgcttgcgttagtaatttctaacatattcattcacattttggagcctaaactatcaatcaccactcaaatcatcatcgttttgattttaattgaatcactaattggattgcgttttttgaaagcgtacgatgttaagcgtggcaaagataaagaaaataagaaaaatagtaaggatttcgttaaactaaaagcaattttactagcaattttatttacatcattggcgctgacagcaggcactgtagctgatatatacggtatcactgacttaggaaatactaggagtgatttaatcgtttggagtataggtggtattatatttggcctcgtatgttacacaatggaagataaaagataacgataaggagctggcgattataaagctagctccttttttaacttatatatgtaaagaactatcctaagggtttttaatcatatgtcaataattcctataattaatactctcaaatattgtttaaataagttttaaaattttacaaatatttttatttaaaaaagatgtataattaatgcattaaatatagaaagaagttgatattatgaaaaagtgtattaagactttgtttttaagtatcattttagtagtgatgagtggttggtatcattcagcacatgcgtcagattcgttgagtaaaagtccagaaaattggatgagtaaacttgatgatggaaaacatttaactgagattaatatactgggttcacatgatagtggctcattcactttaaaggatccagtaaaatcggtttgggcaaagactcaagacaaagattaccttactcaaatgaagtcgggagtcaggttttttgatattagaggtagagcaagtgctgataatatgatttcagttcatcacggcatggtttatttgcatcatgaattaggaaaatttctcgatgatgctaaatattacttgagtgcttatccaaacgaaacaattgtgatgtctatgaaaaaggactacgatagcgattctaaagttacgaagacatttgaagaaatttttagagaatattattataataacccgcaatatcagaatcttttttacacaggaagtaatgcgaatcctactttaaaagaaacgaaaggtaaaattgtcctattcaatagaatggggggtacatacataaagagtggttatggtgctgacacgtcaggtattcaatgggcagacaatgcgacatttgaaacgaaaattaataatggtagcttaaatttacaagtacaagatgagtataaagattactatgataaaaaagttgaagctgttaaaaatttattggctaaagctaaaacggatagtaacaaagacaatgtatatgtgaatttcttgagtgtagcgtctggaggtagcgcatttaatagtacttataactatgcatcaaatataaatcctgaaattgcaaaaacgattaaagcaaacgggaaagctagaactggttggctgattgttgactatgcaggatatccgtggcctggatatgatgatatcgtaagcgaaattatagatagtaataaataaggattcaataatgatattaagacgagtatgaaaatagttagattctaattattttcactactcgtttttattttgaaaataagtaataattcaacaatattataaatcgaacagattgtttgtgaaatttttgataatattaaagtgaaaaagtgttataaattgataaatatatgtaattaacaaaaacaaatcatacaaaaagaagagagttgtgatacggtgaagcgtttaaatgaaatagtgatatgcattagttttttatttttaacaatttttataggaggttgtggcataggtaaagaagcggaagttaagaaaagctttgaaaaaacattgagtatgtatccgattaaaaatctagaagatttatacgataaagaaggatatcgtgatgatcaatttgataaaaaagataaaggcacctggactattagttctgaaatggcaaatcagaaaaagggagaagccttaaatataaaaggtatggttttgaagataaatagaaatacaagaagtgcaaaaggattttactatgttaatgcgataaagaaggatgaaaatggcagacctcaggataatcaaatagaatatcccgttaaaatggtagacaataaaattataccaactaaagatatcaaagatgaaaaaataaaaaaagaaattgaaagctttaagtttttcgcgcagtatggcaattttaaagatttgaaaaattataaagatggagatatttcatataatccagaggtgccgagttattcagttaaatatcaattaacgaatgatgattataatgtaaagcaattacgtaaaagatataatataccaacgaataaagcatctgagttattattgaaaggttcaggaaatttagatggttcatcagttggatacaaaaaaattgaatttactttcgtagagaaaaaaggagaaaacacttactatacggctaacctacattttaaaccaagtgaggataaataatcatccacgcacacgattcaatatgaaattcaaatatgttgctgtaaaataatgtaaaataaacgtattcatattactgaattgagggatagtatgcaacgtgattatttaattcgagtagaaactgaaagcatgccagatttcaaaaggctcaatggtttaatgattggttttgttattaaaggtgaggcacatatttatgatgaaaataatatgacacaatgcgtcagtggcgacattttcatcattaatcaccgcgacttgtatcgatttcaacttcaacaagatggcatcatatgttatatccacttccaaatgaaatatttagcagacaagtttgatgatgtgcattgtttatattttcacttaacagatgcgaccacaacaaaaaatatacatcaactgagaaatataatggcaagactggtttcaacacacattcgacataatgagttgtctaaattgactgagcaacaacttgtgattcagttgcttatgcatatgattcattatgtcccgcgtacatatcattcgaaccaaagtatcttaaatgatgataaagtgaatcaagtatgcgactatatcgagttacattttcatgaagacttaagcctttcggaattaagcgaatatgttgggtggtcagagagccatctgtctaaaaagtttgcagaatcgctaggtgtaggattccagcatttcttaaatacgacgcgaattgagcatgcgaaactcgatttgacatacacggatgaaacgattactgatattgcattgcaaaatggcttttcaagtgcagcgagctttgcgagaacatttaaacactttacgcatcaaacacctaaacaatatcgaggtgatcgtccagcaatcactgaaaatcaacaatcggcacaacataattatcacgaccgtgaattgatattacttttaaatgactacattgaagaaatgaatcatttcattgaagatattgaaaaggtgaactataaagagattacctttcaaccaaccaatcaccaactcaatcaatttaatcatattattcaagtgggctatttgaggaatttgctcaatacacagtatcaatcacagttgcttacatgtcatcatgattttcatgtcaatgaagtattagcatatgatgtgatgccatatattatgaaaaagctcaatgcgccattcacgtatgatgcagaaatttcgaatatattttatgatatcgatttgtgtttagactttttattagataataactttagtttgaccatgcatttggatcattatgactcacgggattatatcgatgcatttaaaatttttatccatcacgttgccctgcatgtcagtcatagaaaagatttgaagttcaacttgtatgtgacgacattgcacacgtctttgattgaaatgattgattattttaaagcattattccctaatggtggcttgtacattcacttagatcaagctacggaaagacatctaccattgttgaaacgacttgagccacacatcgaccattttgtatttgatgccaattcaaatgatgctgttgattttaataaaatgaatgatgatgaatttaaaaccgcaagtcaaatgattattaataaaacgaattaccttatcgatttaatgcatcgtcatcacctaaagcgtccactcattttactcaattggaatacattgacgggtgatacatttatcacaaacggtgaatattttagaggtggtatcatcattgagcaattattaaaattaagttctaaagtagagggtatcgggtattggttgaattatgatttgcacgtcagtcattgtagaaatgaacgggattatatgaattctattgaactgtttcatcaatataatggaaaacgtccggtctatttcacggcattgctatttaataaattaacaagcaatattttgtattctgatgatacatgtattgtcacgggaactgattcaaattttcaaatattgttatatgatgcaaagcattttaatccgtacttagcgttggacaatcaaatgaatatgcgtgcaacggaaatgatccatttgaacattaatgccctagaagacggtatgtataagattaaacattttaccttagataaagaaaatggtgcgttatttaatctttggcgcaaacatcatacgatacatggcatggacaaggactctatagattacgttaatcgaatgagttttccgaaattagaagtgtacgatatagatgtgacggatacactggcattaaacattaaaatgattacgaatgggattcacttaattgaagtaaaacgttacccaagttcataaaatgatcacaaattacaaattttgatatacataatttgtgattttttgtattcaaagttaaaattgcaaaaaattaatggttaacatctctgttgttggcaatataaataatgattaatcatttatgatgtaactaaggagatgaaggatatgaatcaacaattaattgaaactttaaaatctaaagaaggcaaaatgattgagatcagacgttatttacatcagcatccagaattatcttttcatgaggatgaaacggcgaaatacatcgctgaattttacaaaggtaaagatgtagaagtagaaacgaatgtcggaccacgtggaattaaagtaacgattgattcagggaaacctggtaaaacattagcaattcgtgcagactttgatgcattacctattactgaagatacaggattatcttttgcatcacaaaataaaggtgttatgcacgcatgtggtcacgatgcacatacagcatacatgcttgtattagcagagacgcttgctgaaatgaaagatagttttacaggaaaagtcgttgtgatacatcaaccagctgaagaagtaccaccaggtggtgctaaagcaatgattgaaaatggtgtattagacggtgttgatcatgtattaggtgtacacgtcatgagcacaatgaaaacaggtaatgtgtactacagacctggttatgttcaaacaggacgcgcattcttcaaattgaaagttcaaggtaaaggtggccatggttcatcaccacatatggccaatgatgccattgttgcaggtagctacttcgtcacagcgttacaaacagttgtgtctagacgactaagtccatttgaaacaggtgttgtcacaatcggttcatttgacggtaaaggtcaattcaatgtcattaaagatgttgttgaaattgaaggtgatgtacgtggattaacagatgctacaaaagcaacaattgaaaaagaaattaaacgtttatcaaaaggattagaagcattgtatggtgtaacttgcacattagaatataacgatgattatcctgcattatataatgatccagagtttactgagtacgtgactaagacgctaaaagaagcagaccttgaatttggtgtcgaaatatgtgaaccacaaccaccttcagaagactttgcatactatgctaaggaacgaccaagtgcctttatttatacaggtgcagctgtggaagatggtgaaatttacccacatcatcatcctaaatttaacatttcagaaaaatcattacttatttcggcagaagctgtagggacagttgttttagattaccttaaaggagataactaacatgaatgaaacgtatcgcgggggcaacaagttaatcttaggtattgtattaggtgttattacattttggttgtttgcacaatcacttgtaaatgttgtaccaaatttacaacaaagttttggtgcagacatgggaacaattagtattgcggtaagtctaaccgcactattttcaggcatgtttgttgttggagcaggcggcctagcagataaaattggacgcgtgaaaatgacgaatatcggcttattattaagtattattggttcagcattaattattattacaaatttaccagcattgctaattttaggtcgtattatacaaggcgtatcagcagcgtgtattatgccttccacattggccattatgaaaacttattatgagggtgctgaacgtcagcgtgccttaagctattggtctatcggttcttggggtggaagtggtatctgttcactcttcggtggggcagttgcgacaactatgggttggagatggattttcatcttctcaattatcgttgccgtactttcaatgttactcatcaaaggaacgcctgaaacgaaatcagaagttaccaatacacataaatttgacgttgcaggtctaattgttctagtagttatgttattaagtttaaacgttgttattaccaaaggtgcagcacttggttatacatcattatggttctttggtttgattgcaatcgtaattgtagcattctttattttcttaaatgttgagaaaaaagtagataatccacttattgattttaaattatttgaaaataaaccatatacaggtgcaacgatttcgaacttcttattaaacggtgttgcaggtacattaattgtagcgaatacattcgtgcaacaaggtttaggttatacagcattgcaggcaggatacttatcaattacttatttaatcatggtgttattgatgattcgagttggtgaaaaattattacaaaaaatgggttctaagcgaccaatgttattaggtacattcattgtggtcattggtattgcacttatttcattagtattcttaccaggcatattttatgttatcagttgtgtcgtaggatatttatgtttcggactaggcttaggtatttatgcaacaccttctacagatacagctatttcaaatgcaccgttagataaagttggcgttgcttcaggtatttataaaatggcttcatcacttggtggtgcattcggtgtcgcaattagtggtgcagtatatgccggtgcagttgctgcaacgagcattcatacaggtgcgatgattgcactttgggttaacgtattaatgggaatcatggcatttatcgcaattttattcgcgattcctaatgatgataaacgtgtcaaagatgcgaaataataacgatgacacgccaagtgttttgataatgatataaatgaaagtaaagcaaattaaatgaggaaatgtatagagcagtgcatatagataaatctatgattggattaacactaatataaatataaatgaaaaaccatccacttaaacttttgataagttaggtggatggttatttattgcgttgttctaaaaacttggacacttatatggaaagaactatatataatgtgaaggttatggcaattcgcttcaatgaaggcgacgtgtaaaagtggatattaaacgtttcggggtcagactccgagaacagtgtccgtcatgcttaccgcatactaatgaagcattattatatcagtgtttatagccgatttaagataataaagtttgctaaacaaaaaagccaatccattgatgttggattgactttttacatgcatctgaatctctaattttaaaaaatatgaatataaataagacattaaaagttaaatttcagttgttgcaatttcttcatctgtaggtacatcatcgttaagaccaacaagtgcttcagaaacatttcgtgaatgataaccgatacgttcaagaacaccaatcatatcgatatatagtaatccgccttttgttgtacattcaccacgattaaggcgtttaatatgacctttgcgtagtttatgttcaatattaaatgattctctactacgttctacaatttcatcttttttcgttttgtcataaacatctaacatgtcaatggctttatcaaatgactcagcaacatggttgaataatttatccataccgcgttgtgcatcttctgtaatgcgaatatcttcatcatgttggcgttttaattgagcgacatactcttctgttagctctgctacttttaaaatagagcgattgacatcaaacataactgctaaacgctcaacgtctgccttcgtaatggcttttgtagaaattctaactaaataatttcgaatgctatcattgattgtttcaacagcttggtgcttttgttcaagctttttgatcaattttttatcgtcttttgtaatttcgcgaatgtcttcaaacattgataagacaatctgacccacattttgtaattctttttgagtttcttgtaatgcaacaccaggtgcgtgataaacaagatctttgtttaagtgctgaggtttatagtcatcagcaatatctttacctgggacaagctttgtaactatccatgctaaacctgctacaaatggtaattgaatcaaagtatttgttatgttgaagataccatgtgatactgcaatcgtcatcgctggttttaagtgccatacatcttgtaacaaactaatcaaatgaattacaactggcaagaaaattgtgaagataatcaccccgattaagttaaagatgacgtgtacaagcgccgcacgttttgcagcgattgagccggctaaactagctaagatagctgtaatcgttgtaccaatattatcgcctagtaacacagggattgctgcgtttaagctaattaaatcttgttgataaaattcttgtaaaataccaatcgtcgcacttgaactttgaactagtgctgttaaccctgcgccgacaatgacagcaagtattggatttgtagacatatcaagcattaattgcttaaatccatctaatgatgctaaaggtttaacggcatcacccataaattctagaccgaagaatagagaaccgaaaccgaatagtatgcggccaatgttattgattttagagcgtttaaagaaaaagattaaaaatgcacctaatgctaaaattggcattgcatattcgcctaaatctataccgataataaatgcagttaccgttgttccgatattagcacccattatcactccaatggcttgtttcaatgtcataaatccagctgttaccagtccgattgtgataactgtcgtacctgaactactttgtattaaaatagttacaacgatacctgcaataacacctaatactggatttgatgtaaatttgtttaaaatatctcgtagcctgtctcctgctgatgcttgaagcccgtctcccatgatttttaagccgtaaaggaaaatacctaaaccacctaaaaaggagaaaatgacttctgtaaccgacatttccattatttcacctcaaataagctttatatttagattatcgcttataattgtaaatttaatgttaagattaggtaaaattatttaacaatatatgttatttgtatatgacttgtaaaatatcgtcacttattatgtaaattttcagtgtgaaatggcaggtttgcaatcacttgtttaacaaaatgatgcaatcaatcatgcaattatgtgtcatcaaaaaaatcatgtgagtgggataacgaaataaagtttgtgaatatatcatttctatcccactccatgatttgaaatcaccatatagacatgatttaatgtgcctcgttataacaatttgtgttcttttaataatgactcaatgtacgtaccttttatctttttaaggaatcctgctaatgcaagtttttgcattttcgaatctttagtaatctcgcgcaaatcttgatggtcattcagttcgtatacggcatccattaagacgcgaagatcaaatgtactattgatgacctctggaataccacgatctatatttagtaattgataaacagcttccatggcagtacgaaccgaatattctgttgtaaatacagtatctcgctctgtttctgcaaagttaccaataaatgctaaattttgtgattgatgcgggacgactaaaggtctgtcgccgatagcacgcgtcatgaaataagaggtaatatatggcatataaacaggaatcgtattagatgcatgttttgctaagtcttcaattttgtcagttggtacacctaagtgatatagccattcttgacatatttcattaccactacattctgtgattggctttttaatataattgccatttacatctgaatataaggcataaatccacgtagatatttcatttttaggttggtctttaaactgttgctgacgattgattgtaaaactgatttgccatgcagaatcattgattgtaataataccgccagtaaccgttttacctgcaagtggatcacgtttacaaatgctttctattgtatcgataatatctttattgtttgttgtcgatgttgctgaaacaaaccaactttttttaggaatattttggcaaaacttatcaggattaccaaattcaggactttgtcgcgctaaatttttccatagtgtccaactaccacctaattcgtcagttggtggcgctggtgtatcattatcaccataagtagagctttctgtaatactaccgtttgtaacaaagacaagatcgtttatagtcagtttaatagattctgcattaccattacggtcaattaatatttctcgggcaattttttgacttgtcgtaacatctactttaatatcttctacttttacatcgtattcaaattgaaccccatgcgattttaaatattcaaccataggtaatactaaagattcatattgattatatttagtgaattttaaagctgaaaagtctgcgagaccaccaatatgatgaacgaatcgcattagatagcgacgcatttccattgcagaatgccacggttcaaatgcaaacatcgttttccagtaaatccaaaagtttgaattaaagaaatcgtcggaaaatacatctgttattttgacatcatctaaatcttcttcattcgttaagcataaatctaaaatttctttaatcgccgttttagtcaaagtgaagtctccatctgtgactaaacgttgaccctgtttctcaataacacgacaacgagaatagttagggtcttctttgtttaaccaatagaattcatctaatactgacgcatgatcaatttcaagtgaagggatagatctgaataaatcccacaaacattcaaagtggttctccatttcacgaccacctcggacaacatagccttttaaaggcatattttcaccatcaagactaccgcccgctttgggtaactcttctaaaatatgaatcttagaaccttccatttgaccatcccttattaaaaaacaagctgcagcaagtgaagctagaccagatccgattaagtaagcggatttgttttctacattttcaggttttttagggcgcgcaaatgcttcataatttccataactgtaatacatatccaccaagtcctttcgtattagaatacactcagactatacccctttgtgaattgcaaatattagtatttatattggtaaatttgacgaaattagatcatttttatatttttgatttttaaaattttatcactcgaatgtttttggattctgaggtgcgggacttggaataattcgaatcattatgtggcatgttaaacagctaaatataagctatgcacatttaacaagcggatactcctgacgcaattatagtatcattacatattgtttaatcgtttggggtaatgtaattaaaaggtaaaataggcagagtgttatacataaaatgtaaagaaagaggcgatagaatgtctaaaatcaggtcttttacaatattaagtctacttatttacttagctatgatgtgctatacagtagtgacctattcaaaattaccaaccaaagtacctattcactataatttagcagggtatgctgataactttgctgataaatgggttttgcttttgattaatagcgcatttatagtgatttggcttatatttttcattgcaggtagatactatgaacgatttgccaaatggtcacattataatcatacaccacgtgaaattcgagcgattaaattatttttaagtacgttaaatttagagattatgagctatatgtctatcttcacagtattagaaatttggcaaatacaacaccatcatcaattcaatttactatggtttaatatgatatttatcattatcattggtttgacgcttgtcatattttgtttacttccgacaattcataaaatgagagattctcaataaaaatataaactgtcatgatacagttttgaagcggattcctgagattattataaataatatctagtatttataattaaaatgatatattatttattatagttaaatattgtgtatattttgtgaactttttgtaaaaattcgattgcctgtcacatataggagtgttacattttaaatatgtgatcatcgcaaaatataagttgaaataggttgtagattaatcaggatgataaatattttatataaagagagggagtcattatgacattacttactgtaaatccattcgataatgttggattatcagccttagttgcagcagtacctattattttatttttattatgcttaaccgtttttaaaatgaaaggcatttatgcagcattgacaactttggttgttacattgattgtggctttatttgtatttgaattaccagcgcgtgtatcagcaggtgcgattacagaaggcgttgttgccggtattttcccaataggatatatcgttttaatggcagtttggttatataaagtttctattaaaacaggacaattttctattattcaagatagtattgcaagtatttcagaggaccaaagaatccaactattattaattggattttgtttcaatgcatttttagaaggtgcagcaggatttggtgtgccaattgcgatttgtgcagtattattaattcaacttggatttgaaccattaaaagcagcgatgttatgtttaattgctaatggtgcggcgggtgcctttggtgcaattggtttaccagttagtattattgatacgtttaacttaagtggaggcgttacaacattagatgttgcgagatactcagcattaacacttccaattttaaactttattattccatttgttttagtattcattgtagatggtatgaaaggtattaaagaaattttacctgtcattttaacagtgagtggtacatatactggattacaattattattaacaatattccatggtccagaactagcagacattattccatcactagcaacaatggtggtgttagcatttgtttgtcgtaaatttaaaccgaaaaacattttcagattggaagcgtctgaacataaaattcaaaaacgaacgcctaaagaaattgtctttgcttggagtccgtttgtcattttaactgcctttgtattagtatggagtgcaccattcttcaaaaaattattccaacctggaggtgcacttgaaagtctagtaataaaattgccaattccaaatactgtgagtgatttatcgcctaaaggaattgcgttgcgtctcgatttaattggtgcaactgggacagcgattttattaacagtaattattacaattttaattacgaagttaaaatggaaaaatgcaggtgctttattggtcgaagcaattaaagaattatggttaccgatccttacaatttcagctatcctagctattgctaaagttatgacatacggtggtttgactgtagcaattggacaaggtattgctaaagcgggagcaattttcccattattctctccagtattaggttggattggtgtgtttatgactggttcagttgtaaataacaatactttattcgcacctattcaagcgacagtggcacaacaaatttcaacaagcggttcattacttgtggcagctaacactgcaggtggtgtagcagcgaaacttatttcaccacaatcaattgccattgcgactgcagctgttaaaaaagttggtgaagaatctgcattattaaaaatgacgttaaaatacagtattatatttgttgcctttatttgtgtttggacgtttatactaacgttaatattctaaatataaataatgttgtcacttggattcaaatgacattttaaatctaattattcatgaatcgaactagtacgaaatgcaatgagcatcttgtctagttcgattttttaatgtctaaaaatgtcgtatatataatcagagtagaaagtgttgaggcgtttcagaagttgtttagaaaagtaagtaaaataaaaaatgcactgagcaacaaaagatgttgctcgtgcatttagatgattcttatcatttcaaataagaatgtgttaatcaacgtatataagttaaaattggtttggataaaatgatatctatcgttgtgtattgtttgtttttatagttcgcgacgacgtccagctaataacgctgcacctaacgctaatgataatccaccaaatacagttgtaccgatgaatggattttcttcaccagtttctggtaatgcttgagctttgttagcatctgcatggtttgctggttgcttcttatcaacaacaagttcttgaccaggtttgatcatgtttttatcagctaatttgttatctgcagcaattttgtcagcagtagtgccgtttgcttttgcaatgtcatttactgtatcaccaggtttaacgacatgtattccgttgccgtcttctttaccaggtttgttgccatcttctttaccaggcttgttgccatcttctttaccaggttttttgttgtcttctttaccaggtttgttgccatcttctttgccaggttttttgttgtcttctttaccaggtttgttgccatcttctttgccaggttttttgttgtcttctttaccaggtttgttgccgtcttctttaccaggcttgttgttgtcttcctcttttggtgcttgagcatcgtttagctttttagcttctgctaaaatttctttgctcactgaaggatcgtctttaaggctttggatgaagccgttacgttgttcttcagttaagttaggtaaatgtaaaatttcatagaaagcattttgttgttctttgttgaatttgttgtcagcttttggtgcttgtgcatcatttagctttttagcttctgctaaaaggttagcactttggcttgggtcatcttttaagctttggatgaaaccattgcgttgttcttcatttaagttaggtaaatgtaagatttcatagaaagcattttgttgttctttgttgaatttgttatcagctttcggtgcttgagattcatttaactttttagcttctgctaaaaggttagcactttgacttgggtcatcttttaagctttggatgaaaccattgcgttgttcttcgttcaagttaggcatgttcaagatttcatagaaagcattttgttgttctttgttgaaattgttgtcagctttcggtgcttgagattcgtttaattttttagcttcacctaaaacgttagtgctttggcttggatcgtctttaagactttgaatgaaaccattgcgttgctcttcgtttaagttaggcatgttcaaaatttcatagaaggcgctttgttgatctttgttgaagttattttgttgcgcatcagcttttggagcttgagagtcattaagtttttgagcttcacctaaaacgttagcactttggcttggatcatctttaaggctttggataaaaccattacgttgatcagcgtttaagttaggcatatttaacacttgataaaaagcattttgttgagcttcatcgtgttgcgcagcatttgcagcaggtgttacgccaccagatataagtaatgtacctaaagttacagatgcaatacctacacctagtttacgaattgaataaatgtttttctttttcaaattaataccccctgtatgtatttgtaaagtcatcataatataacgaattatgtattgcaatactaaaatctatatttataattaaatttaaaggtaagttttacaacttataaaataaaaattttgttcaaagatttattcaggaagtaaaaggcttaaaaccgcaaaatcacgctattccgattaataaaaacagataaaatatatagatattttttataatgaaagcggtttattacatatgagttaaaaaatatttttaagaataaaatggaattttgaatgtgctgaggtttaatttcggaaatggttttaagagatatagaaaatagaaagttgttcataatgtgctgaggttttattaaaaaatagaaaacacaagtgcactttagaatacagcacacttgcgtaatagagatattattcaaaaacaagatgtaaatgatttttatctgccaataattgattcacttgagctaataattgttcagcatggtcttgctgtgcgtcattcatatgaattaaaatttttctttcatcttcagttgagcgttcttttattagatagccttgcttttttaaattattgagagctctaacagtttgagggtatttatggtggattgtttcaattaaatctttaagaagaacgatgtttttattttgagaagtgataatagctagaattgtgaattctacaaaacttaatgttagatgctttttgataatattcttgaaatacattgtatacatcatcaagtttagaaattctttactatcttttggtatcatctgtgattcactttgatctgcaagattaaattgtttaatgatttgatcaaacaatgtaacacgttctgcaattttctctcgttgttcttcagatattgaaatgtaagtattacgctcatcaattttactacgaactttactaatatatgaatgtttcacaagtacttttatatgctgtactaaatccgattgtttataacataaatctgaaacaatcttcttaaatggaagtgtgttttcttgctgatgaaataaataagtcagtaatataaattcttttatagtcatatcgacttcaggcttgacttttttcttaaaacgaaacatatatgcttcaatgattataaaatctctaattttgtcatggttattatatttcattgttttatctccttgtatatgcactttattttaatataacacaatataataagaaaaataatccataatttacaattaaaaataatatgatatttttattaaaatttgtgtttttgaataaatgacattatcaaacactatatttaaataagaaatagttatcgatatttgaaaaattgaagaatattgattgatattatagaatgtgagtcggtgttatttgtatataaagtattaatatgtaattaagaaagtcgacgcttgttaacaataacgacaactatatgtataaaaaaacctcgcaacggttagttagcttaaacattttgctaacgttgttgtgaggtcattttgttttaataatatcgttataactttttcacggttaataataagtatatgaagaatggggcaccaaaagcagcaataaatacacctgctggcacttctttaggtaagaataaggtacgcccaattaagtctgcaataacaattgatatggcaccaatcattgctgacattagtaactttttagcataacttccgcgaacgattgttttcgcgatgtgtggtgcaattaaaccgacaaacccaatatttcctactaaactgattgccatagatacgagtattgtagaagtgattaattgaatcagcttcatacgttgtacatgtaaacctaagccaatcgctacagggtcatcaagtatagatattttcattttaggtataacaagaaataacaacggaataacagctacgattaccatacccaaaatgaatgtatctttaaacgttgcaccgtaaagacttccgactaaccaagtataagctttggctgcagatagttgctttgttgtaataagtagcccttgtacaagtgcaataaataatgtttgcattgaaataccgatgattatgagtgttgtcggtcgaatgtgacctttcgtttgaaacactaatagaatcaccattgcaattgcgccacctaatacagcaaatagaggaagtaaatgtatcgttaaatggctgaaaaatgcaataaagacaacagcacttaagctagcaccacctgtgattccgataatatctggtgaggcaattggatttttcaagacattttgtaacattaaaccgctcatccctagtgctgcaccagctaatatcgcaagtgtaatgcgaggtaagcgtaatacttctaaagtgaattgatctatactgtcatttggatttataaagtacatcagtacgcgttgtaatggtataaagcttgaaccaaccatcatacttaccactgaaacgatggctaaaaagattaacgcgaagatgagatggtaattgtcctttttattaaccttttcggtcataagcgttgacgtcctttcttcataagatagattaagacaatagcgccaatgacagcggtaacgacaccgataggcaactctagtggcttaataataatacgagcaacaatgtctgagataatcattaggattgctccagctaatgcagtaaaaggaattaaatacttatagtttggtggtaataatcgtttgctaatattcggtacgataagacccacaaaggcgattgatccagctactgctaccgaaataccggctaacatactgatgagcataataatcatccatttgattaattttatgttttgaccgaggccggttgcaatgtcgtcacttgtcatcaagatgttgatgtgtgcagccatgctaaatgcaattaaaataagtatcaatacaagcggaataatccatgggatatcccaaatgttacgtaatgaaacggagccactcaaccaaaataataggccttgtaagtctgtttcattcataatgagaatgccttgagtaaaagctgtaaataacatcgcaatcgcagcacctgccaaaatgacacggtgaggtgaaaatagggtttgtctaaacatacctagtgcaacgactaagactgtaacaacaatagctcccaaaaacgcgatgacaacaatcattttaaaagattgaatttggataaatgtaatactaaagatgacaaaaaatactgcgcctgcattgacaccgaaaagccctggtgatgctattgggtttcgtgtaagtgcttgcatcaacaagcctgagacagcaagggcagcaccagtcaataacgcaatgatggttctcgacgcccgtgcaccagtgacaacatcatgtaaatcgttttcactatcaaagttgaataacgcctgtatcaccgtacctggtgacacaagcgtatttccaatcattaaacttaagatagctactattgcaagacataaaccagcaataacgatttggtattttggtttaagtagcatcgtaaaactccttaattattttgattgtttttcaatatttaacttttcatataaatcgtcaataagttttaatgatgatttatatccgccagctaaattccaagtgatttcatctaaatcatcagatacttggttgtttttaactgcgtctaaatttttccactctttacttgaagtccattcgccttcagtctttttaactaatgcagcatctttcgcatttggatctgattttactacaaaaatatgatcagcgttcattaatggaatgctttctttagatgtaagttggataatatctttaccattatcaacttgtttttgtaagtctttattacgtttgaatcctaaatcatttaagatttcaccagcatatccaccagcataaattcttgtatgatcagcacggaagttaacaactgaagctttcaatggccatgcatctttatactttgcttttgcatctttttggaatgcagctactttatcatcgtactttttaagtaaatcttcagcttctttttctttccctaaagctttccccattaacttagttgtatctttgaatttgaaaactgtatcagtagaaactgttggtgcgattttagataattgatcgtaaactttttcatttctaacttttgacgcgacaattaagtccggttttaatttagagatttcctctaagttaggtgcaggttcttgacctacaatcttagtatcttttaaatcattttttatgtattcgaatttcggtttttgtgtccatgattctacagcacctacaggtttaacacctaaagatacagcgacgtcagtggcaccttgatatagcgtaacaacacgctttggtttccctttaatttcagttgtacccattgcatgtttaattgaagttgtttccttatctttgctatcagatgattgcttatttgaattcccactacatcctgctaaaacaagtaggaaagcaagcgtaacaacaagcattttaattactttattcattgactaattagcctccttcgtgatgtatgacaatgagaatcattatcacggtttagtatgaattaaattttttcctaagtcaataaaatatttatgatttacatgcaacttataattatttgacatataaatgcataaaaaatataatcctaattacttgatagtgagaatcattatcaattaggtaacacacaatattatagaattttaaatttgaggaggaagcgcttttgattgaaaaaagtcaagcatgtcacgattcattgttagattctgtagggcaaacacctatggttcaacttcatcaactatttccgaaacatgaagtgtttgcaaagttagagtatatgaatcctggaggcagcatgaaagatcgacctgccaagtacatcattgaacatggtatcaaacatggtttaatcactgagaatacacatttaattgaaagtacttctggaaatttaggcattgcgttggcaatgatagctaaaataaagggattaaaactcacgtgtgttgttgatcctaaaatatcaccaacaaatttgaaaatcattaaaagttatggtgccaatgtagaaatggttgaagaacctgatgcacatgggggttatttaatgactcgtattgcaaaggtgcaagaactgttagccactattgacgatgcatattggattaatcaatatgcaaatgagttaaattggcaatcccattatcatggtgcaggcacagagattgttgaaacaattaagcaacctatagattattttgtcgcgccagtcagcacgacaggtagcattatgggtatgagtagaaaaattaaagaagtgcatccaaacgcacaaattgttgctgttgatgcgaaagggtcagtcatttttggtgacaaacctattaatagagaattacctggtatcggtgctagtcgtgtacccgaaatattgaatagatcagaaattaatcaagtgatccatgtagatgattatcaatctgctttgggctgtcgaaaactgattgattatgaaggcatatttgccggaggttcaacaggttcgattattgcagcgattgagcagttaataacgtcaattgaagaaggtgcaacaattgtcacgattttaccagatcgaggcgatcgttacttagatttagtttattcagatacatggttagaaaaaatgaaatcaagacaaggagttaaatcagaatgaatagagagatgttgtatttaaatagatcagatattgaacaagcgggaggaaatcattcacaagtttatgtggacgcattaacagaagcattaacagcgcatgcgcacaatgattttgtacaaccgcttaagccgtatttaagacaggatcctgaaaatggacacatcgcagatcgaattattgcaatgccaagtcatatcggtggtgaacacgcaatttcaggtattaagtggataggtagtaagcacgacaatccatcgaaacgtaatatggagcgtgcaagtggtgtcattattttgaatgatccagaaacgaattatccaattgcagttatggaagcaagtttaattagtagtatgcgtactgcagcagtttcagtgattgcagctaagcatttggctaaaaaaggatttaaagacttaacaatcattggttgcgggctaatcggagacaagcaattacaaagtatgttagagcaattcgatcatattgaacgcgtgtttgtttacgatcaattctctgaagcgtgtgcacgctttgttgatagatggcaacaacagcgtccggaaattaattttattgcgacagaaaatgctaaagaagcagtatcaaatggtgaagtagtcattacatgtaccgtaacggatcaaccatatattgaatatgattggttacaaaagggtgcatttattagcaacatttctatcatggatgtgcataaagaagtctttattaaagctgacaaagtcgtagtagatgactggtcacaatgtaatcgagaaaagaaaactattaaccaattggtgttagaaggtaaattcagcaaagaagcacttcatgctgaacttgggcaacttgtgacaggtgacataccaggacgtgaagacgatgatgaaatcatattacttaatccgatgggtatggctatcgaagatatttcaagtgcttactttatttatcaacaggcacaacaacaaaatattgggacaacattgaacctatattaagaatgcgaggtgtctgaatattgcagaatcatacagcagtcaatacagcacaaacgataatattaagggatttagttgatgcattattatttgaagatatagccggtattgtatcgaatagtgagattactaaagaaaatggacaaaccattttgatatacaaacgtgaaacacaacaaataaagatacctgtttattttagtgctttaaatatgtttcgttatgaaagttcacaaccaattacgatagagggaagggcgtctaagcaacctttaacggcagctgaattttggcaaaaaatcgtcaaaatgaatcgtgatttaagtcgtgaatgggaagtggctcgcgttgaagaaggactgactactgctgccacacagcttactaaacaattatcagaattagatttagcgtcacatccttttgtgatgtcagagcagtttgcaagtttaaaagatcgtccatttcatccattagctaaagaaaaaagaggattaagagaagcggattatcaagtgtatcaagctgaattaaatcaatcatttcctttaatggttgcagcagttaaaaagacacatatgattcatggcgatactgcaaatattgatgaattagaaaatttgacagcacctataaaagaacaagcgacagatatgttaaatgatcaagggttatcaatagatgactatgtactatttccggtacatccttggcaatatcaacatattctgccgaacgtctttgcgaaagagattagtgaaaaattggttgtactattaccgttaaaatttggagattatctatcgtcttcaagtatgcgttcattaattgatattggcgcaccgtataaccatgtcaaagtaccatttgcaatgcagtcattaggtgcattaaggctaacgcctacgcgttacatgaaaaacggagaacaagcagaacaattattacgtcagcttatagaaaaagatgaagcactagctaagtatgtcatggtttgtgatgaaacagcttggtggtcatatatgggtcaagataatgatattttcaaagatcaattaggtcatttaactgttcagctaagaaaatatcccgaagtgctagccaaaaatgacacgcaacagctagtgtcaatggcagcactcgcggcaaatgatcgcaccttatatcaaatgatttgtggaaaagataatatttctaaaaatgatgtcatgacgttatttgaagatatcgcacaagtctttttaaaggtaacactatcatttatgcaatacggcgcattaccagagttgcatggtcaaaatatattgttgtcatttgaagatggacgtgtacaaaaatgcgtgttacgtgatcatgatactgtcagaatttataaaccatggctaacagcacatcagctttcattgccgaagtatgtcgtcagagaagatacacctaatacgctaattaatgaagatttggaaacattctttgcttattttcaaacattagctgtatcggtaaatctatatgccattattgatgcaattcaagatttatttggtgtaagtgagcatgaacttatgtcgttgttaaaacaaattttaaaaaatgaagtggcaactatttcctgggttacaactgatcagctagctgtcagacatattttatttgataaacagacgtggccatttaaacaaattttattaccattgctatatcaacgtgatagtggtggaggtagtatgccttcaggtttaactaccgtaccaaatccaatggtgacatatgattaatcagtctatatggcgcagtaactttcgcattttatggctcagtcagtttatagcgattgctggactgacagtacttgtgccattattgccaatttatatggcatcactacaaaatctatcagtcgtagaaatacagttgtggagtggtatagcgattgctgctccagctgtaacgacgatgatagcttcgccgatatgggggaagctaggtgataagatcagtcgaaaatggatggtgttaagagcgttacttggtttggcggtatgcttatttttaatggcattgtgtactacaccattacagtttgtacttgtgaggttattgcagggactatttggtggtgttgtcgatgcatcaagtgcgtttgcgagtgcagaggcgccagctgaagatcgtggaaaggtattaggaaaactgcaaagttcagtcagcgcagggtctcttgtggggccattaattggcggtgttacagcttcgatattaggttttagtgcgttactgatgagtattgccgttattacttttattgtctgtattttcggtgcattaaaattgattgaaacgacacatatgcgaaaatcacaaacaccaaatattaataaaggtattcgccgctcatttcaatgtctattatgcacacaacaaacatgtcgatttattatcgttggcgttttagcaaactttgctatgtatggcatgctaactgcattatcaccacttgcttcatcagtgaatcatacagcgatagatgaccgtagtgtgattggatttttacagtccgcattttggacggcttcaatattaagcgcgcctttatggggtcgctttaatgataaatcatatgttaaatcagtatatatatttgccacgattgcatgtggttgtagtgcgatactgcaaggtttagcgacgaatatagagtttttaatggcttcaagaatacttcaaggattaacatatagtgcattgattcaaagtgtcatgtttgttgttgtaaatgcttgtcatcagcaacttaaaggcacatttgttggaacgacgaacagtatgttagttgttggtcaaattattggcagtcttagtggcgctgccattactagttatactacaccagctactacgtttatcgttatgggcatagtatttgctgtaagtagtttatttttaatttgttcaaccatcactaatcaaatcaacgatcacacattaatgaaattatgggagttgaaacaaaaaagtgcaaaataaagaattaatacaacatgcagcgtatgcggctatcgaacgtattttaaatgaatattttagagaagaaaatttatatcaagtaccacctcaaaatcatcaatggtctatacaattatcagagctcgaaactttaacgggtgaatttcgctattggtctgcgatggggcatcatatgtatcatccagaggtatggcttattgatggaaaaagtaaaaaaataacaacttataaagaagcaattgcgcgtattttgcaacatatggctcaaagtgcagataatcaaacggcagtgcaacaacatatggcgcaaattgtgtctgacatcgataatagcattcatcgcacggcgcgttatttgcaaagtaacacaatagactacgtagaggatcgttatatcgtttcagaacaatctttatacttaggtcatccatttcatccgactcctaagagtgcaagtgggttttcagaagcagatttagagaaatatgcacccgaatgtcatacatcattccaattgcattatttagctgtgcatcaagatgttctgctcacgcgctatgtagaaggtaaagaagatcaggttgagaaagtgttgtatcaattagcagacatagatatatcagagatacccaaagattttattttattaccaacacatccttatcaaatcaatgtgttgcgacagcatccacagtatatgcaatatagtgaacaaggtttaataaaagaccttggcgtttccggtgattcagtgtacccgacgtcttcggttagaactgtattttcaaaagcattaaacatttatttaaaattaccgatacacgttaaaatcactaattttatacgtacgaatgaccttgaacagattgaacggacaattgatgccgcgcaagttatcgcatcagtcaaagatgaggttgaaacaccccattttaaattgatgtttgaagaaggatatcgtgcattgttaccgaatccattaggacaaacagttgaacctgaaatggatttattaactaatagcgccatgattgttcgtgaagggataccaaattaccatgctgataaagatattcatgtattggcgtcattatttgaaacgatgcctgattcaccgacctctaagttatcacaagtgattgagcaaagtggtttagcaccagaagcatggcttgaatgttatttggatcgtaccttattgccgatattaaagctgtttagtaacacaggcattagtctagaagcacatgtacaaaattcattaattgaattaaaagatggcatacccgacgtatgctttgtcagagatcttgaaggcatttgtctatctagaacgattgctactgaaaagcaacttgtgccaaatgttgttgcagcatcaagccctgttgtatatgcacatgatgaagcatggcatcgtcttaaatattacgttgtagtaaatcacttaggacatttagtatcaactattggtaaagcgactagaaatgaagttgtgttatggaaacttgtagcgcatcgtcttatgacttggaaaaaagaatacgcgaataacgcagtatttgttgactgtgtagaagatttatatcaaacgccgaccattgcggctaaagcgaatttgatgagtaaattgaatgattgtggtgcaaaccctatttatacacatataccaaatccaatttgtcataacaaggaggtatcgtattgtgaatcaaacaattcttaatcgtgtaaagactagagtgatgcaccaactggtatcatcgcttatttatgagaatattgttgtgtataaagcgtcatatcaagacggtgtcggtcattttacaatagaaggacatgattcagagtatcgttttactgctgaaaagacacatagctttgatcgtatacgtatcacatcaccaattgagcgtgtcgtaggagatgaggcagatacaacaatagactatacacaattactgagagaggttgtatttacatttcctaaaaatgatgaaaagctagaacaatttattgtcgagttattacagacagaactaaaagatacgcaaagtatgcagtatcgagaatcaaacccaccagcaacacctgagacatttaacgactatgaattttatgcgatggaagggcatcagtatcatccaagttacaaatcacgtttaggatttacattgagtgataatttgaaatttggtcctgactttgtaccaaacgttaaactgcagtggttagctatcgacaaagataaagtagaaacgacggtatcaagaaatgttgtagttaaagaaatgttacgtcaacaagttggcgataagacttatgaacattttgtacagcaaattgaagcgtctggcaaacatgtaaatgatgttgagataatacctgtacacccatggcagtttgaacatgtcatccaagttgatttggctgaagaaaggcttaatggcacagtactatggttaggggaaagtgatgagctatatcaccctcaacaatcgattcgtacgatgtcgccaatagacacgacaaaatattatttaaaggtaccaataagtataacgaatacttcaacgaaacgagtgttggcgcctcatacaattgaaaatgcagcgcaaattacggattggttaaagcagatacagcaacaagatacgtatttaaaagatgaattaaagacagcttttctaggggaagtcttaggacagtcttatttaaatacacaactttcgccttataaacaaactcaagtttatggtgcgttaggtgttatatggcgtgaaaatatatatcatatgttaatcgatgaagaggatgcgataccatttaatgcactttatgcaagtgataaggatggtgtaccattcattgaaaattggattaaacaatatggttctgaagcttggacaaagcaatttttagctgtagcgattcgtccaatgattcatatgctttattatcacggtattgcctttgaatcgcatgcacaaaatatgatgctcattcatgaaaatggttggcctacacgtattgccttaaaagatttccatgatggtgttcgttttaagcgtgagcatttaagtgaagctgcttcacacctgacattaaagccaatgccagaagcacataaaaaagtgaatagtaattcatttattgaaacagatgacgaacgtttagtacgcgactttttacatgatgcatttttctttattaatatcgccgaaatcatcttatttattgaaaagcaatatggtatcgatgagcagcggcaatggcaatgggttaaaggcatcatcgaggcgtatcaagaagcatttccagagttgaataactatcaacatttcgatttgtttgaacctacgattcaagttgaaaagttaacgacacgtcgattattaagtgactccgagttaagaattcatcatgttacaaatccattaggtgtaggaggtattactgatgcaacaactatctctgaaacatagattaaacaatggtgattcagtttatggcatttttaattctataccggacccattgatgatagaggttatcgcagcaagcgggtatgactttgttgtgattgatacagaacacgtggcgattaatgatgagacactagcgcatttaattcgtgcagctgaagcagcgcatattataccaattgtacgtgtcactgcagtaatagatagagatatcattaaagtgttggatatgggtgcgagaggtattattgtgccacacgttaaagatcgtgagacagttgagcatattgtgaaattaagtcgttattacccgcaaggattaagaagtttgaatggtggtcgcatggcaagatttggacgtacaccattacttgatgcaatggagatggctaatgagcatattatggtgattgccatgatagaagatgttgaaggggttatggccattgacgatatagcacaagtcgaaggtttagacatgatagtcgaaggtgccgcagatttatcccagtcacttggcataccatggcaaacgcgtgatgatcaagtaacatcacatgttcaacatatttttgaagttgtgaatgctcatggtaaacatttttgtgcattaccacgtgaagatgaagatattgcaaaatggcaggcacaaggtgtacaaacatttattttaggtgatgatcgtggaaaaatatatcgccatttaagtgcatctctagcgacgtctaaacagaagggggatgaagactaatgcgtatagttcaacccgttattgaacaattaaaagcacaatctcatccagtttgtcattatatctatgatttagtcggactggaacatcatttgcaacatattacatcgtcattgcctagtaattgtcagatgtactatgcaatgaaagcaaatagtgaacgaacaatcctagatacaattagtcagtatgttgaaggatttgaagttgcatctcaaggtgaaatagcaaaaggtcttgcttttaaaccagcaaatcatattatttttggtggccctggtaagacagacgaggaactaagatatgcagtaagtgaaggtgttcagcgtattcatgttgaaagtatgcatgaattacaacggctaaatgccatcttagaagatgaagataagacacaacacattttattgcgtgttaatttagcaggaccatttcccaatgcaacgttgcatatggcaggacgcccaacacaatttggtatttctgaagacgaagttgatgatgtcattgaagctgcgctagcaatgccaaatattcatctagatggatttcattttcattctatttctaacaatttagactcgaatttacatgtcgatgtagtgaaactctattttaaaaaagcaaaatcatggtctgaaaaacatcgatttccactcaaacatatcaatcttggtggtggtataggggttaactatgcagatttaactagccaatttgagtgggataattttgtagaaaaatttaaaacactgatcgttgagcaagaaatggaagatgtgacattgaactttgaatgtggtcgctttattgtggcacatattggttactatgtgacagaagtgctagatattaagaaagtgcatggtgcttggtatgccattttaagaggaggtacgcaacaatttagactgccggtatcttggcagcataaccatccttttgacatttatcgctataaggacaatccatattcatttgaaaaagtttcaatttcgagacaggacacaacgttagtcggtcaattatgtacaccgaaagatgtctttgctagagaagtacagatagaggcaatcagtacaggcgacgttattgttttcaaatatgcaggtgcatacggatggtctatttcacatcacgatttcttaagccatccacatcctgaatttatttatttaacgcaaacaaaggaggatgaataactattgaatcatattcatgaacatttaaaattggtaccagtagataagattgatcttcacgaaacattcgaacctttaagattggaaaaaacgaaaagtagtattgaagcagatgattttatacgtcatcctattttagtgacagcgatgcaacatggtagatatatggttatagatggtgtgcatcggtatacaagtttgaaagcgttaggatgtaagaaagttccagtgcaagaaatccatgaaacacaatattcaattagtacatggcaacataaagttccatttggtgtgtggtgggaaacgttacaacaagaacatcgcttaccatggactactgagacaagacaagaagcgccatttattacgatgtgtcatggtgatacagaacaatatttgtatacaaaagatttaggcgaagcacattttcaagtatgggaaaaggttgtcgcaagttatagtggttgttgttctgtagagagaattgcacaaggtacatatccttgtctttctcaacaagatgtactcatgaagtatcagccattgagttataaggaaattgaagcggttgttcataaaggggaaactgtgccagcaggtgtgacacgctttaatatttcaggacgatgtcttaatcttcaagtaccactggcattacttaaacaagatgatgatgttgaacaactgcgcaattggaagcagtttttagcagataagtttgccaatatgagatgctatactgaaaaagtatacttggtggagcaatagttttactgtgatgttgagggaaatatgatgatttagcctattgatagcgaaaatataataaaacaatatagtgtggagaacttttgatattttataaatattgaagttctccatttttgtattttgcatataaaaattaaatgaaataaggtatattaaggtaaagtataaattttaaataaatggggaatgagtatgaatacggatttaattataggaaaaatagcaatttggataggcatcgtagttcaaatatgttataacgtcgtcattgttagcatgacaaccttcatcttttttataaatactgaaggagcaagccctgaaatagctgttttaatagcattagtaatcattcttatcttaactttaccacctatcctaaccgtgattaacttagagaataaaatggaagtaaaaggtacgctttttattgtttatgcgattgtggcattttgtatgtttaattacctttcatcaattttatgggtggtttgcggcatttttcttatttggactaaatattcaaaaggtgggtcaacaggtaagaatgagaatgaaaaagttgaaattgaaagtacagagaatcaatttgaatctaaagataaaaccactaaagaataaagagaatatttaaggcggagtataaatattaaataaatggggaatagacatggaaaaaaatgtagaaaaatcattcataaagataggtttatattttcaaatagcttatatagtactcatggctataactttatgtgggtttgtaatttgctatggactaattttcggccttttctatttattgtcaggtagcagagctgattatttaatagtaacgatagttatatcgtcaataatttctatatttgtaattatactttcaatcgtacctgtcatcgtattggcatctgacttatttaaagaaaggatttcaaatggtgtcatattaattgtattggctattatcgctttagtattatgcaactttgtatctgcaatactctggtttgtttcagccatatctattttaggtagaaaaaaattagtatctacatcagatactaccactattcaaaaaagtaaagggaacgcaaatcaagcatcacataaagacacgtgtaaaaaggaacttgatagtcaagacatgatggaacatcctgagtttaaaaatcccacgactaaaaacctagaaggattaaacgaagaaatacataaagatgaagctacaactaaagttgacagtgataacacggaaccgccgtttgaatcaaaagaccatgtctcgaaaaaagattgatgacaaactaatcgagagacttaaaaaaataatattcaacataagcacttttaaaacgacatttaaacgcattgccaatcactaatggtagtgcgtttaactataccttaaatatctgaatattttgttaaatggagttacctttgttgtactattcaaatgaagaggagtaaaatgtaattaaaggaaagtaatttgaggagtgatctttatgacaaacaacaaagtagcattagtaactggcggagcacaagggattggttttaaaattgcagaacgtttagtggaagatggtttcaaagtagcagttgttgatttcaatgaagaaggtgcaaaagcagctgcacttaaattatcaagtgatggtacaaaagctattgctatcaaagcagatgtatcaaaccgtgatgatgtatttaatgcagtaagacaaactgcagcacaatttggcgatttccatgtcatggttaacaatgccggtcttggaccaacaacaccaatcgatacaattactgaagaacagtttaaaacagtatatggcgtgaacgttgcaggtgtgttatggggtattcaagccgcacatgaacaatttaaaaaattcaatcatggcggtaaaattatcaatgcaacatctcaagcaggcgttgagggtaacccaggcttgtctttatattgcagtacaaaattcgcagtgcgaggtttaacacaagtagccgcacaagatttagcgtctgaaggtattactgtgaatgcattcgcacctggtatcgttcaaacaccaatgatggaaagtatcgcagtggcaacagccgaagaagcaggtaaacctgaagcatggggttgggaacaatttacaagtcaaattgctttgggcagagtttctcaaccagaagatgtttcaaatgtagtgagcttcttagccggtaaagactctgattacattactggacaaacaattattgtagatggtggtatgagattccgttaataatcatccactaatgataaataaatccttattgttaagtttaatcacttagcagtaaggattttttagtgcacttagaagggattgtattggtagaaaattaataacagaagctcttaagtgagttatgatgtcacagtctaatgcatcatttgaaagcattactaaattctatccagcatagttacgctaaaacatcataaaacaccactatctaatttatctgcataaaaattcacaaagttatctcatttcatttttataaataaaaaatatcgataaaaagcttacaatactttatgtttttgtgatatatttttaatgtataaatgaggtggaagatttggaaaaagttttgataactggtggggcaggatttatagggtctcatttagtagattttttgagccaagattatgatgtttatgttctagataactatagaacaggtaaacgagaaaatattaaaagtttggctgacgatcatgtgtttgaattagatattcgtgaatatgatgcagttgaacaaatcatgaagacatatcaatttgattatgttattcatttagcagcattagttagtgtcgctgagtcggttgagaaacctatcttatctcaagaaataaacgtcgtagcaacgttgagattattagaaaccattaaaaaatataacagtcatataaaacgattcatctttgcatcatctgcagccgtttatggtgatttacctgatttacctaaaagtgatcaatcattaattctaccattatcaccatatgcaatagataaatattacggcgaacgtacgacattaaattattgctcgctatataacattccaacagctgttgttaaattctttaatgtatttgggccaaggcaagatcctaagtctcaatattcaggtgtgatttcaaaaatgttcgattcatttgaacataacaagccttttacattttttggcgatggtctgcaaacgagagactttgtttatgtttatgatgttgttcaatctgtgcgtttaattatggagcataaagatgcggttggacatggttataacattggtacgggtacatttacgaatttgctagaggtttatcgcattattggtgaattatatggaaaatcagtcgagcatgattttaaagaagcaagaaagggagatattaagcattcttatgcagatatttctaatttaaaagcattaggatttgttcctaaatacactgtggaaacaggcttaaaggattactttaattttgaggtagataatattgaagaagttacagcgaaagaagtggaaatgtcgtgaaattggcattgaagctgtccataataagggttacgcctatcaaagaaaattagacacactagaagaagtaaaaaagggctattttccaatcaaacgtgcgattgacttggtattaagtatcgttttattatttttaacatttccgattatgttcatattcgccattgctatcgtcatagattcgccaggaaaccctatttatagtcaggttagagttgggaagatgggtaaattaattaaaatatacaaattacgttcgatgtgtaaaaacgcagagaaaaacggtgcgcaatgggctgataaagatgatgatcgtataacaaatgtcgggaagtttattcgtaaaacacgcattgatgaattaccacaactaattaatgttgttaaaggggaaatgagttttattggaccacgcccggaacgtccagaatttgtagaattatttagttcagaaataataggatttgagcaaagatgtcttgttacaccaggattaacaggtcttgcgcaaattcaaggtggatatgacttaacaccacaacaaaaattaaaatatgacatgaaatatatacataaaggtagcttaatgatggaattatatatatcaattagaacattgatggttgttattacaggggaaggctcaaggtagtcttaatttgtatagaaaaatcaaatacaagattcattttcaaaattgtgaccaattgttacagtataacgaggaatcccttgagacagtatcaaatggcattaagaaatatttgccatcattgatttgcatggctataaatactattcatctgatgagatagccatgttaagaaattgtaagtaaagcattaaaggggtttgtaacagttgaaaattatatattgtattactaaagcagacaatggtggtgcacaaacacatctcattcaactcgccaaccatttttgcatacaccatgatgtttatgtcattgtaggcaatcatggaccaatgattgaacaactagatgcaagagttaatgtaattattatcgaacatttagtaggtccaattgactttaaacaagatattttagctgtcaaagtgttagcacagttattctcgaaaattaaacctgatgttatccatttacattcttctaaagctggaacggtcggacgaattgcgaagttcatttcgaaatcgaaagacacacgtgtagtttttactgcgcatggatgggcttttacagagggtgttaaaccagctaaaaaatttctatatctagttattgaaaaattaatgtcacgtattacagatagcattatttgtgtttcagatttcgataaacagttagcgttaaaatatcgatttaatcgattgaaattaaccactatacataatgggattgcagatgttcccgctgttaagcaaacgctaaaaagccaatcacataacaatattggcgaagttgttggaatgttgcctaataaacaagatttacagattaatgactcgacaaaacatcaatttgttatgattgcaagatttgcttatccaaaattgccacaaaatctaatcgcggcaatagagatattgaaattacataacagtaatcatgcgcattttacatttataggcgatggacctacattaaatgattgtcagcaacaagttgtacaagctgggttagaaaatgatgtcacatttttgggcaatgtcattaatgcgagtcatttattatcacaatacgatacgtttattttaataagtaagcatgaaggtttgccaattagcattatcgaagcgatggctacagggttgcctgtcatcgctagtcatgttggtggcatttcggaattagtaactgataatggtatatgtatagtgaacaatcaacctgaaactattgccaaagtcctggaaaaatatttaatagacagtgattacatcaaaatgagtaaccaatctagaaaacgttatttagaatgttttacagaggagaaaatgattaaagaagtggaagacgtttataatggaaaatcaacacaatagtaaatatctaacattgttacttatcggtttagcggtttttattcagcaatcttcggttattgccggtgtgaatgtttctatagctgactttatcacattactaatattagtttatttactgtttttcgctaaccatttattaaaggcaaatcattttttacagtttttcattattttgtatacatatcgtatgattattacgttgtgtttactattttttgatgatttgatatttattacggttaaggaagttcttgcatctacagttaaatatgcatttgtagtcatttatttctatttagggatgatcatctttaagttaggtaatagcaaaaaagtgatcgttacctcttatattataagcagtgtgactataggtctattttgtattatagctggtttgaacaagtcccctttactaatgaaattattatactttgatgaaatacgttcaaaaggattaatgaatgaccctaactatttcgcaatgacacagattattacattggtacttgcttacaagtatattcataattacatattcaaggtccttgcatgtggtattttgctatggtctttaactacaacggggtctaagactgcgtttatcatattaatcgtcttagccatttatttctttattaaaaagttatttagtagaaatgcagtaagtgttgtgagtatgttagtgattatgttaattctactttgttttaccttttataatataaactactatttattccaattaagcgaccttgatgccttaccgtcattagatcgaatggcgtctatttttgaagaggggtttgcatcattaaatgatagtggatctgagcgaagtgttgtatggataaatgccatttcagtaattaaatatacattaggttttggtgttggcttagtggattatgtacatattggctcgcaaattaatggtattttacttgttgcccataatacatatttgcaaatttttgcggaatggggcattttattcggtgcgttatttatcatatttatgatttatttattatttgaattatttagattcaatatttctgggaaaaatgtaacagcaattgttgtaatgttgacgatgctgatttactttttaacagtatcgtttaataactcaagatatgtcgcttttattttaggaattatcgtctttattgttcaatatgaaaagatggaaagggatcgtaatgaagagtgattcactaaaagaaaatattatttatcaagggctataccaattgattagaacgatgacaccactgattacaatacccattatttcacgtgcatttggtcccagtggtgtgggtattgtttcattttctttcaatatcgtgcaatactttttgatgattgcaagtgttggcgttcagttatattttaatagagttatcgcgaagtccgttaacgacaaacggcaattgtctcagcagttttgggatatctttgtcagtaaattatttttagcgttaacagtttttgcgatatatatggtcgtaattactatatttatagatgattactatcttgttttcctactacaaggaatctatattataggtgcagcactcgatatttcatggttttatgctggaactgaaaagtttaaaatacctagccttagtaatattgttgcgtctgttattgtattaagtgtcgttgttatctttgtcaaagatcaatcagatttatcgttatatgtctttaccattgctattgtgacggtgttgaatcaattacctttgtttatctatttaaaacgatacattagctttgtttcggttaattggatacacgtctggcaattgtttcgttcgtcattggcatacttattaccaaatggacagctcaacttatatactagtatttcttgcgttgttcttggtttagtaggaacataccaacaagttggtatcttttctaacgcatttaatattttaacggtcgcaatcataatgattaatacatttgatcttgtaatgattccgcgtattactaaaatgtctatccagcaatcacatagtttaactaaaacgttagctaataatatgaatattcaattgatattaacaatacctatggtctttggtttaattgcaattatgccatcattttatttatggttctttggtgaggaattcgcatcaactgtcccattgatgaccattttagcgatacttgtattaatcattcctttaaatatgttgataagcaggcaatatttattaatagtgaataaaataagattatataatgcgtcaattactattggtgcggtaatgaatttagtattatgtcttgttttgatatatttttatggaatttacggtgctgctattgcgcgtttaattacagagtttttcttgctcatttggcgatttattgatattactaaaatcaaagtgaagttgaatattgtaagtacgattcaatgtgtcattgctgccgttatgatgtttattgtgcttggtgtggtcaatcattatttgcctcctacaatgtacgctacgctgctattaattgcgattggtatagtagtctatcttttattaatgatgactatgaaaaatcaatacgtatggcaaatattgaggcatcttcgacataaaacaatttaagtatcggtaacgctatactttagaaatttaagatgaagaagaaaaggcaatttcttattgaaaaatggaagttgtcttttttaattctttttaaaagcgggaaacaaaaggagttaaatgcctttttgcattcaatattaaatattatatcaatttcgaatatttaaattttatataattggatataacaaataaataataattattgcaaaacacacccgaaattaattattataaaagtatattcataaaaggaggaatatacttatggcatttaaattaccaaatttaccatatgcatatgatgcattggaaccatatatagatcaaagaacaatggagtttcatcacgacaaacatcacaatacgtacgtgacgaaattaaacgcaacagttgaaggaacagagttagagcatcaatcactagcggatatgattgctaacttagacaaggtaccggaagcgatgaggatgtcagtccgtaataatggcggtggtcattttaaccattcattattctgggaaatactatcacctaattctgaagaaaaaggtggcgtaatagacgacattaaagcgcagtggggcactttagatgaatttaaaaatgaatttgccaataaagcaacaacattatttggatcaggttggacttggttagttgttaatgatggaaaattagaaattgtgacaacgccaaaccaagataatccattaacagaaggcaaaacaccaatcttactatttgatgtttgggagcatgcctactatctgaaatatcaaaataaacgtccagactatatgactgcattttggaatattgttaactggaaaaaagttgatgaattataccaagcagcaaaataatataacttaatataattgaggtggagcatctacaaggtgtttcaccttttttgtacttaatatctttacttattcgtttttgtgtaatgggatagcgcgtaaaagtggcaaaataataagataaatttcaactcgaaataccttattattgttgactataacgatgacctaaatgctatatacatcagacaacactattgattaatcaacatattgtcattaaataaattgacaaaataagtaattattgtgaatctaaagtgaaatttttataaaaaattgtaatgattcaaaaattttgttgcatttcttttgtaatcatatgataatataaatgtaatcaaattgtaatataaggggaaaagacaatgaaaaaattagcaacagtaggttctttaattgtaacaagcactttagtattctcaagtatgccttttcaaaatgcgcatgctgacacaacttcaatgaatgtgtcgaataaacaaagccaaaatgtacaaaatcatcgcccttatggcggagtagtaccacaaggaatgacgcaagcacaatatactgaattagagaaagctttaccccaattaagcgctggcagtaatatgcaagactataatatgaaattgtatgatgcgacgcaaaatattgctgataaatacaatgtgataattacaactaatgtaggggtatttaaaccacatgctgttagagatatgaatggccatgcgttacctttaacaaaagatggcaatttttatcaaacgaatgtagatgcaaatggtgttaatcatggtggtagtgaaatggtgcaaaataaaacaggacatatgagtcaacaaggccatatgaatcagaacacacacatgaaccaacagccacacatgctacaaggtcatatgcaatcatcaaaccatcaaatgatgagtccaaaagcaaatatgcattcatcaaatcatcaaatgaaccaaagcaacaaaaaagttttaccagctgctggtgaaagtatgacatcaagtattcttactgcaagtattgccgcactactattagtatctgggttattcttagcatttagacgacgttcaacaaacaaataaacataatacgattaataatagaaaaatcgtgtgattatctgagcgagcctaggacataaatcaatgtcctaggctcgctaatgttatattggcagtagttgactgaatgaaattgcgcttgtaacaagcttttccatttcttgcccacttcctaagtagtcatcacaaaatttcttatattttaataattttaataatccgattgtcttatacgtgtcagtgttaattcagatatttcctgaggaatataccacttattaatcataatcggatagggcgtttgtgcgtacaatgtttcaataatcagccaacaatgtgtatcaccatcaaacacgtgactatgatttttgaagtggggcgctttggtaatagacatttttaaatctgattgatatgcattgctataaatcgtctgctcaacgaacgtcttcatgtcgtcttcgttttgtgtattcactttaaatgtgtcaatgacatttaacggtataaaggtaaaacaaaatgcatcagcttgcttagaaggattgtcctttttttgataatagcgttccattgcaatgacggcagaaggatggtttgcaaacaaatgatttgtatattcactttctaaatcaacacgataattaattgatgacatagatacacgagctagcaatatttgatcaagtggatgcttaaattgatccatacttgaagcgtgttgggcatttgtttgtggaataacaaagtgtcccttccctcttgtactctctacgatgccatcttcggctaacaattttatagcttggcgcaaagtcatacgactgacatcaaagcgcgcacaaagttccttttcagtaggtaatgcatggccactcggatattttcctatttgaatttctttatataacgtattataaatcgttaaaaattttggttgtgtttgcgtcacgtagacaacctccataaagttacttaatcactctcatcatacaataatttttactcgaattggaaaaattataaaaattaaacatagaaacaacttgaacattggttttatgcaagatcagtagagataactgtaaaatgttcttaatattgtcaaaatgtaatacttgaaagcgcttttaaaaaatattattatatacatggttagacaaatagacaaattactatacaaatattgggaggaatattttatgaaatcaacaccacacattaaaccaatgaatgacgtcgaaattgcagaaacggttctattgccaggagatccgttaagagctaagttcattgcagaaacatatttggacgatgtggaacagttcaatacagtgcgaaatatgtttggttttaccggaacatataaaggtaaaaaagtttctgtcatgggttcaggaatgggtatgccatctattggcatttactcttatgaattaattcatacatttggttgtaaaaaattaattcgcgttggttcttgtggcgcgatgcaagaaaacattgatttatatgatgtgattattgcacaaggtgcctctactgattcaaattacgttcaacaatatcaattaccaggtcattttgcgccaattgcttcttatcagttattagaaaaagctgttgaaacagcacgtgacaaaggtgtacgtcatcatgtaggtaatgtgttatcaagtgatattttctataacgcggatacaacagcgagtgaacgttggatgcgtatgggtattttaggtgtagaaatggaatcagctgcattatacatgaatgcaatttacgctggtgtcgaagcattaggtgtgttcacagtgagcgatcatttaattcatgaaacgtcaacaacacctgaggaaagggaacgtgcatttacagatatgattgaaattgcactgtcattggtgtagatgattatgaatgttgaatattctaaaataaagaaagcagtacctattttattattcttatttgtattcagtttggttatagacaactcatttaaattgatttctgtagccattgctgatgacttaaacatttctgtaacgacagtaagttggcaagcgacattagccggtttagtaattggtattggcgctgtagtatacgcttcattatctgatgccattagtatacgcacactatttatttatggcgtgatattaatcattatcggatcaattattggttacattttccaacatcaattcgcattacttttagttggacgtattattcaaactgcaggtttagctgctgcagagacattatatgtgatatatgttgcaaagtatctttctaaagaggaccagaagacttaccttggcttaagtacgagcagttattccttgtcattagttatcggtacattatcaggtggatttatttctacgtatttacactggacaaatatgtttttaattgcattaatcgtagtatttacgttgccattcctatttaaattattaccaaaagaaaataatacaaataaagctcatttagattttgttggcttaattctagtggcaactatcgctacaacagtcatgctgtttattacgaactttaattggttatatatgattggtgctttaattgcgattatcgtttttgcgctatatattaaaaatgcgcaacgtccattagtaaacaaatcatttttccaaaataaacgttatgcttcatttttatttatagtatttgtaatgtatgccatccaattgggttatatttttacgttcccattcataatggaacaaatttatcatcttcagctagacacaacatcactgctattagtaccgggttatattgtagcagtcatcgttggtgcactaagtggtaaaatcggcgaatatcttaattcaaaacaagcgattatcacagcaattattttaatcgcactgagcttgattttacctgcatttgcagtaggtaatcacatttcaatcttcgtcatttctatgatattctttgcaggtagctttgctttaatgtatgcacctttacttaacgaagccattaaaacaatagatcttaatatgactggtgtggctattggtttttataatttaattattaatgtggcggtatctgtaggtattgcgattgctgcggctctaatcgattttaaagcattaaatttcccaggcaatgatgcattaagttcacatttcggtattattttaattattttaggtttaatgagtattgtcggattagttttattcgtcatcttaaatcgttggacacaatctgaaaaataaatagatataaattcgcgagatatattcgtatttatagtaaaattaaataaagagattatataacacgaggagtagtaagtatgaaatttgagaaatatatagatcacactttattgaagcctgagtcaacacgtacgcaaatcgatcaaatcatcgatgaagcgaaagcatacaattttaaatctgtatgtgtgaatccaacgcatgttaaatatgcagcagagcgactagctgattcagaggtgctcgtttgtacggtaataggattcccattaggtgcgtcgacaacggcaacgaaagcatttgaaacagaagatgcgattcaaaatggtgcagatgaaattgacatggtcatcaacatcggcgcattaaaagatggacgttttgatgatgtacaacaagacattgaagcagtggttaaagctgcgaaaggtcacacggtaaaagtgattattgagacggtattgttgaaccatgacgaaatcgtaaaagccagtgaattaacaaaagcggctggtgcggacttcgttaaaacttcaacaggttttgcaggtggcggtgcgactgcagaagacgttaaattaatgaaagatacagtaggtgcagatgtagaagtaaaagcatcaggtggcgtacgtaatttagaagatttcaataaaatggttgaagcaggtgcgacacgtattggtgcgagcgcaggcgttcaaattatgcaaggtttagaagcagattcagattactaatatatataaaatttgggagtgatagctatgacaagaccatttaatcgtgtacatttaatcgtaatggattcagtaggtattggtgaagcgccagacgcagcagattttaaagatgaaggttcacatactttaagacataccttagaaggcttcgatcaaacattaccaaaccttgaaaagttaggtctagggaacatcgataaattaccagtagtaaatgcagttgaacaaccagaagcatactatactaaattgagtgaagcttcagttggtaaagatacaatgactggtcactgggaaattatgggattaaatattatgcagccttttaaagtataccctaatggattccctgaagagttaattcaacaaattgaagaaatgacaggtcgtaaagttgttgctaacaaaccggcatcgggtacgcaaattatcgatgagtggggcgagcaccaaatgaaaactggtgacttaattgtttatacaagtgcagacccagtattgcaaattgctgcacatgaagacattatcccattagaagagttatatgatatttgtgaaaaggttcgtgagttgacaaaagaccctaaatatttaattggtcgtattatcgcacgtccatatgttggtgaaccaggaaactttacacgtacatctaatcgacatgattatgcgttaaaaccatttggtaaaactgtcttagatcatttgaaagacggtggttatgatgtcattgccatcggtaaaattaatgacatttatgatggtgaaggtgtaacagaagcggttcgtacgaagagtaacatggacggtatggatcaattgatgaaaattgttaagaaagatttcacaggtattagtttcttaaacttagtagactttgatgcattatacggtcatcgtcgtgataaaccaggttatgcacaagcaattaaagatttcgatgatcgcttgccagaactgtttagcaacttaaaagaagacgatttagtaattattacagcagaccatggtaatgacccgacagcgccaggtacggaccatacaagagaatatatcccagtaattatgtacagtccgaaatttaaaggtggtcatgcactagaaagtgatactacattcagttctatcggtgcaactatagcggataatttcaacgtaacattaccagagttcggtaaaagttatttaaaggaattgaaatagaataaatttagatattataaaaatagcagtgaagttaactataataatagttttcttcactgctgtttttattataatagagaaacgtaagacggtagtacctcttatttaggagtatcctgatttaatgttaaacaatacgttttcggattgaaccggaaattaaatcgacaattgcgaccattagtactaaaccgattaatataatacctacacggtcccaagaacgtgtttgaatggcaaatatgagtggtgtcccgataccaccagctccaattagccctagtatagaagctgaacgtaagtttagttcaaagcgataaagtatgagtgatagaaaggcaggcataatttgtggtatgactgcaaatacgagtgttttaatcttattcgcaccactggcctttaatgattctacagcactgaaatctagaccttcaatatcttcagctaaaagtttcccaagcatacctacggaatggatacctaaagctaatacacctgaaaatgaacctgggccaacagctttgataaatataagtgccattacaatttctgggaagacacgtataacacttaaaataaatttgctaacacctgaaactgggcgtagctttaccatattatttgcacctagaaatgctaatggaatacagataattgcggcgatgaaagtacctacaacggctatcgcaaaggtttcaagtaaaccacgtaataagtcttcgccatctggtatatagatatagctgatatcaggatggaataatccgctgaatatggattttaagatttctaatgatttacttttaagttctaaacttggtacacctgcaaatgcccagatgataatagctaagacgacaattgcaataagccatcttttaatcaattttcgtttgtgtgcttttgtgtgaacattatattttgctatttcctgtgtcatgcgagatgtgccctcactttcgtactgatgtaatcaatgacgacgacgataactaaagtaaataaaataatcgttgctgtttttggatattgaaataaaccaagtgtttgatcataaaacaatccaataccgccagcgccgactaatccaagcacagctgaagcacgtatatttacttcaaatgcatataatacgtatgacataaatgacgatatggcttgtggtacaacaccgaaaacaatccattttattttattagcgccaacagccgtcattgcttccattggacctggatctatcgtttccaatgattcatataataattttccaataatacagatagttaaaataaacaatgctaatatccctggaatttgaccgattccaaatacagccacaaagattgctgctaatagcaaatctggaatagtacgaactatatttaaaataaagcgcgagggtattgaaatccacttttgatgaacgatattgctagcacataataacgcaattggtattgaaacgatgctacctaatactgtacttacgatagccattcgaatggtatctaacattggcgttgtaatttgttgtaaatactcgaaatcaggtggaatcatttgtttgaatagatcacctatttgaggtattcctatcattaaatctccaaaattaaaccccgtataaatgaagctccaaatgataagcacaatgattaacatgaaggtaaaactcgtttttaaagaaacctttttctttaaaagggagtcatactttgtaggtgtttctaaaggcatgttagttcactcctagcttttcatcttctttaattgtacgtccatatattttactaaatacgtcatctgttgcttcagatgcaggaccatcatagacaacttcaccatcacgtaaaccaatgatgcgtgtgccatattcttttgctaagtcaacaaaatgtaagttaattaaaattgtgatgcctaattcttggttgatttttcttaaatcatccataacctgtttcgtagttaatgggtctaatgaagcaactggctcatctgcaagaataatttcagattcttggcatagcgcacgtgcaatagatatacgttgttgttggccacctgataattcatcagagcgttgattatatttatctaagatgttgacccgttctagtgcatccattgctttaattttgtcttcttttggaaataaacctaataccattttccaagtagggtgataacctacacgtccacttagtacatttcgtaatacacttgaccgtttaactaaattaaaatgttggaaaatcatacctatatttcggcgcatttctaataatgctttaccatgggctttagtgattgatttaccttggatgaaaatttcacctgacgtgatatcatgcaaacgatttacagatcttaataacgtggatttcccagcaccagatagtccgacaatgactgcaaattcacctttttcaatatttaagttaatatttttcaagcctacatgaccgttaggatagactttactgacgtttttaaattcgatttgactcatgtttgacacctttctttaataaagaaaagccaaggtaaactgaaatatcatagacagtgggtttctgtgtacaaatagtttcaaatgtacagcgacacctttctatatctgtttcagtttagcgcctagcttttcaatattaatctagaatatatctattgaacgaaagcttttaataccaaattcgataatgattcattggttaaataatgattatttcatatctttaactaatttttcgtactctcttacaatgtcgaaatttgaatctttcgtttctgtgtatccttcatgtgaataaacttcgctaataattttgtgaccttcttttgatttagcaatgtctataaaagcttttttcaatttctcttggaagtctttatccatatctggtcttacagaaattgtgtcattcggaatagcttgtgttaattttaaaattcgtgtgtctttaaatacatttggttggtcttttttcacagtattacgtgcatcgttaaatacagctgcagcatctacatctccatttaataatgagataactgcttggtcatgacctttaacattcacaattttcatatctttagttgcattaatacctgcttcgttttttaacatcgcaagtgggaatgtatatccagcagttgatgttacatcttgtaaggcaattttcttaccttttaaatctttcaagcttttaatttttgagtcttttttaacaagaatttctgatttataactatctacaagttctttacttgctgaaccatcttcttttacaccaaaacgttgtgcttgtaataataaatcagctgctttttgatcatgtgctaatgtgtatgccgttggtggtaagaaaccaacatcaacttttttagacttcatagcttcaacaattgtattgtagttagttgatacagacactttaactggaatccctaattctttagatagtaatttttctaatggttttgctttagcctctaatgttccagcattttgcgaaggtacaaattgaactgttaattctttaggtttgtatcctcctgatttagaatccgaatcattactagcgttcttttgattatctaaagaacttgaatttccgcatgctgctgcaaaaacaatgactgctaacattaatacaaataaacacttaaaatttttcatttgataactgtccccttcacattcttaatcgtgtaatatgtatgcaatgaaattacacttatagcgtaccacatttaaatacgaaaaagtattttataaaaatgaattttaataactttctttaagagtttgataagattttgtaaaattttcgttaaattgctcatttcaaacatatatttatcctataattcaagaacaaatttattttaaaaggagcctcacaaaatgaaaaaaatatataagtcattaactgtctctgcaattgttgcaacggtatcattaagtgctttaccgcaatctttagctataacgcatgaatcgcaacctacaaagcaacagcaaacagtattattcgatcgttcgcatggtcaaacagctggtgctgcagattgggttagtgatggtgcattttcagattatgcggattcaatacaaaaacaaggttatgacgttaaagctattgatggtcattcgaacataacagaagcaagtttgaaaagttccaaaatatttgtaattcctgaggctaacattcctttcaaagaatcagaacaggcagcaattgttaactatgtgaaacaaggggggaatgttgtctttatttcagaccattacaatgctgaccgaaatttaaatcgtattgattcatcagaggcaatgaatggttatcgacgtggagcgtatgaagatatgtcgaaaggtatgaatgcagaagaaaaaagttctactgcaatgcaaggtgtgaaaagttcagattggttatctacaaactttggcgtacgttttcgatataatgcactaggtgatttaaatacgagcaatattgtttcttcaaaagaaagtttcggtattactgaaggtgtgaaatctgtatctatgcatgccggatcgacattagcaattactaatccagagaaagcaaaaggtattgtgtatacaccagaacaattgccagcgaaaagtaaatggtcacatgctgtagatcaaggtatttataatgggggcggtaaagcagaaggtccctatgtagcaatttctaaagttggaaaaggtaaagcagcatttatcggtgattcatcacttgtggaagatagttcgcccaaatatgtaagagaagataatggagaaaagaagaaaacatatgatggttttaaagaacaagacaatggtaagctattaaataatataacggcttggatgtctaaagataatgatgggaaatcacttaaggcgagtggcctaacattagatacaaagactaagttgcttgattttgaacgaccagagcgttcaactgagcctgaaaaagagccatggtcacaaccgcctagtggttataaatggtatgacccaaaaacatttaaagcaggtagttatggcagtgaaaaaggcgcatatcctcagccaaccacaccagatgatcatacgccaccaaatcagaccgaaaaagtatcatttgatatcccgcaaaatgtttctgtaaatgagccatttgaagtgacaatacatttaaaagaatttgaagcaaatcaaacacttgaaaatcttagagttggtatttacaaagaaggcggacgtcaaatcggacaattttcaagtaaagataacgattataacccgccaggttacagtactttgccaacagttaaagcagatgaaaacggaaatgccacaattaaggtcaatgctaaagtacttgaaagtatggaaggttcaaagattcgtttaaaactcggtgacaaaaccttgattacaacagacttcaaataaatatataatagaaataagaaagatgtttgtgattgaaggagtgagtgaggatgtcaaacatagcattttatgtcgtgagtgacgtacatggttatattttcccaacagattttacgagtagaaatcaatatcagcctatgggattgttactagcgaatcatgttatagaacaagacagaaggcagtatgaccaaagttttaaaatagataatggtgattttttgcaagggtcaccattttgtaattacttaatcgcgcatagcggcagtggccagcctttagttgatttttataatcgaatggcattcgactttggtacgcttggtaatcatgaatttaattatggattaccatacttaaaagacactttacgcagactcaattatccagttttgtgcgctaatatttatgaaaatgatagtacattgactgataacggtgtgcagtattttcaggttggagatcaaacggttggtgtgataggtttaacgacacaatttattccccattgggaacaaccagagcatattcagtcacttacgtttcatagtgcttttgaaacacttcaacaacacttgcctgaaatgaagcgacatgcagatatcattgtggtttgttaccatggtggatttgaaaaggatttagaaagtggtacgccgaccgaagtgttaacgggtgaaaatgaaggatatgccatgttagaagcattttctaaagatatagatatctttattacgggtcaccaacatcgacaaattgctgaaaggtttaaggatacggctgtgattcaacctggtacgagaggtacaactgtaggcaaagttgtcttgagtactgatgaatatgaaaatgtatccgttgaatcatgtgaattacttcctgttatagatgatcccacatttactattgatgaagatgaccaacatatacgaaagcagttagaggactggttagattacgaaattactacattgccatatgatatgacgattaatcatgcatttgaggcacgtgtggcaccgcatccttttactaattttatgaattacgctttattagaaaaaagtggagcagatgttgcctgtacagctttgtttgattctgctagtggtttcaagcaagtcgtgacgatgcgagatgttattaacaattacccatttccaaatacatttaaagttttagctgtaagtggtgccaaacttaaagaagccattgaacgatcagcagaatattttgacgtgaaaaatgatgaagtaagtgtgagcgcagacttccttgaacccaaaccacaacactttaattatgatatatatggtggcgtaagttataccattcatgttggaagaccaaagggacaacgtgtgagcaatatgatgattcaaggtcacgcagttgatttaaagcagacatatacaatttgtgtaaataattatcgtgcagttggcggtggtcagtatgatatgtatatcgacgcgccagttgtaaaagatattcaagttgaaggcgcacaactacttattgattttttatcaaataataatttgatgcgcatcccgcaagttgttgattttaaagttgaaaagtgacggatatatgtaaaacttacttgattttaatcgggtaagtttttgtttttgtttaaactaatcactcttaaaaaccaatatactttaagaaaaatgttgattttacaaaaaataaggcttatattttatataacttaatattaggaagtgattaatttggaaacaattaaacaagaagtaagagaatctattgttaaaggaattatcgcgggatataaggactatgttaatgagagaaatgaagtcaagaaacgtatggtgattagtgatgcctatgtgtacaccaaatctaatcatattgaaaatcaagttgctaagcatttggaaaattttgttaagtatattaaagaaaatgctggaccatcatggaagtatttaaagtttatatttaataaagatgaagagaaaaataatatcatgtttatattgaaaaatgaagattactttgatgaaaaaaatgtaagcgtagggaagagtttagttgctgataaaaatccaaaaagtaaaaactacctagaggtacttatggctaagaatagggacattaattttggtactgttgaagaagattttgaaattgggcatcaaatgactgcagatagtatattatttaatataaaagaaggcagtaatagagatattaattcttattttttaattattacatatcgtattgataaagaatcaaagcaattagctgcaatcaaacaatggttaccaaatccagaaacaaattctgcaattatggttgatgatttgacagagttaatagaaaaagtaatagtagaaagagaagattatcatattgacgaagaagagttagaagtacttaaaaacgatggagagttagaactcatagatgtggaacatgcatttggtatcagtatcgatgaaggtaacgatatgattgaaagtgaaaggtgaagttaatgtttattggcaagaatttagaatacgtgagaaagcttaatgctctaagtagaaaagaattatcagaaaaaataaatgtgagtgaacaagcaatttggcaatatgaaacaaaaaatatgatgccagaaattagtaaaatttatgatatgacatctatttttaatgttaaatctagctactttattagcgagcagcccgaagagctcctaataaattctgtcgataaacatagtatagcttttagagcaaaaaattataaagtatctacgaaactattaaataagcaatattatcaagcaatgtatttatctaatttaactagctacttattttcttttgtaaagataccggataatattattttatctttaataaataatttaaatgacttgttgaatggcaatttagaatcactaaataaaaaagaaagcataaaagaaactgctaaagttgtgagggctaaaattcttcaagacgaaagcaatgaagcactattatttatgcttgaaaaagcgggtatagttatatacgaaaagcgaattaatgatagcatagacgcatatagtttttggagtaaagatcagacaccttttattatactgggtacaaataagggggtagcagttagaaggaattttgatcttgcacatgagctgggacatctcgttctacatcgtcatattcaattcgacttattatctcctgaagaatataagacaattgaacatgaggcagatattttcgcctctgaatttttactacctgaagaagcgtttaaaaaagactttgatcaaatgaaaaaaaaatcaaatcctgactatttagctgtattgaaagaaaaatggtatgtttctatacaagcaattgcaatgagagcctattatctaggtctaatgtctagtactcagtacagatatttttgggcatcattaaataaaaaaggctataaaagtaaagagcctttagacgacgtgattgaaatgtcacgtcctgtcaaaatgaatagtttattaaagttgtattttgatagaaatatactgacaccacaaaaattattgaattatttaaaagttgatgaaacatttttgaatcatctagcaggtattaatttaaaactctttaaggattatgttaatgaaaatagagaatataatataacgaatctatataaataaggcaccaatatttaaacctcgagctgaaaagatcatcatttcagttcgaggttttttatttgtaacatctgttgataggtatcgacaaggaccttttaatgttgtgttttgtgcgatataacaagctttttaggctattaaagaatattcagaattaaatatataattatgaataaattatgtcattgaaaaaattatgattataaaatcattctaaaaacaccggaataacaatgatttcatgaaaacatttattttaaaatttgatatttgttcaaataatattcgaaattaaacttttttgtatagaattttctttatatcctgagagacatgtactataatgtttgtgaaataattcacaaagtataaaggagtggttgtatatgttaactatacctgaaaaagaaaatcgtggatcgaaagaacaagaagtggcaattatgattgatgctctagctgacaaagggaaaaaagcattagaagcattatctaaaaagtcacaagaagaaattgatcatattgttcatcaaatgagtttagcagctgttgatcaacatatggtgctagcaaaattagcacatgaagaaactggaagaggtatatacgaagataaagcgattaaaaatttatacgcttctgaatatatatggaattcaataaaagacaataagacagtagggattattggtgaagataaagaaaaaggattaacgtatgtagcggaaccaattggtgttatttgtggtgttacgccaacaacaaatcctacgtcgacaactatttttaaagcgatgattgcaattaagacaggaaatccaatcatttttgcattccatccaagtgcacaagaatcgtcgaagcgtgcagcagaagttgtattagaagcggcaatgaaggcaggtgcacctaaagatattattcaatggattgaagtgccttctatcgaagcaacaaaacaattaatgaatcacaaaggtattgcattagttctagcaacaggtggttcgggcatggttaagtctgcatattcaactggtaaaccggcattaggtgtgggaccaggtaacgtgccgtcttacattgaaaaaacagcacacattaagcgtgcagtaaatgatatcattggatcaaaaacatttgataatggtatgatttgtgcttctgaacaagttgtagtcattgataaagaaatttataaagacgttactaatgaatttaaagcacaccaagcatattttgttaaaaaagatgaattacaacgcttagaaaatgcaattatgaatgaacaaaaaacaggtattaagcctgatattgtcggtaaatctgcagttgaaatagctgaattagcaggtatacctgtccccgaaaatacaaaacttatcatagctgaaattagcggtgtaggttcagactatccgttatctcgtgaaaaattatctccagtattagccttagtaaaagcccaatctacaaaacaagcatttcaaatttgtgaagacacactacattttggtggattaggacacacagccgttatccatacagaagatgaaacattacaaaaagattttggactaagaatgaaagcttgtcgtgtacttgtaaatacaccatcagcggttggaggtattggtgatatgtataacgaattgattccgtctttaacattaggttgtggttcatacggtagaaactcaatttcacataatgttagtgcgacagatttattaaacattaaaacaattgctaaacgacgtaataatactcaaattttcaaggtgcctgctcaaatttattttgaagaaaatgcaatcatgagtctaacaacaatggacaagattgaaaaagtgatgattgtctgtgaccctggtatggtcgaattcggttatacaaaaacagttgagaatgtattaagacaaagaacggaacagcctcaaattaaaatatttagcgaagtcgaaccgaacccatcaacgaatacagtatataaaggtctggaaatgatggttgatttccaaccggatacaatcattgcacttggtggtggttcagcgatggatgctgcaaaagcaatgtggatgttctttgaacaccctgagacatcattcttcggtgctaaacaaaagttcctagacatcggtaaacgtacttataaaataggcatgcctgaaaatgcgacgttcatttgtatccctacgacatcaggtacaggttcagaagtaacaccatttgcagttatcacagatagtgaaacaaatgtaaaatatccgttggctgattttgctttaacacctgacgttgcaattattgaccctcaatttgtgatgagtgtgccaaaaagcgttacagcagatacaggaatggatgtactaacgcatgcaatggaatcatatgtatctgtaatggcttcagattacacaagaggtttgagtctacaagcgattaaattgacgttcgaatatttaaaatcatctgttgaaaaaggtgataaagtttcaagagagaaaatgcataacgcatcaactttggctggtatggcatttgcaaatgcattcttaggcattgcacactcaattgcgcataaaattggtggcgaatatggtattccgcatggtagagcgaatgcgatattactaccgcatattatccgttataatgccaaagacccgcaaaaacatgcattattccctaaatatgagttcttcagagcagatacagattatgcagatattgccaaattcttaggattaaaaggtaatacgacagaagcactcgtagaatcattagctaaagctgtctacgaattaggtcaatcagtcggaattgaaatgaatttgaaatcacaaggtgtgtctgaagaagaattaaatgagtcaattgatagaatggcagagcttgcatttgaagatcaatgtacaactgctaatcctaaagaagcactaatcagtgaaatcaaagatatcattcaaacatcatatgattataagcaataatctatctgataataatcatctaactcacctgaaattacaaaagtaaaaaatgccacataaactttaagtcgataatcattatacggttatcggcttttatttattgccaaatcttcagagagatacaacctagacaaacattttttaaataaagaaaatattaagattggtacacttttcgcaaactattaccactttagagtataattatttttaatttcatataaataaaagggcgaaaataatgcggtttaaaagtaattaattgtttaaacgatatgtaatatgtaaatactatatatttaataccaattttaatgaaaatttttaagggaggtaaataatggaaagtacattagaattaacaaaaattaaagaagtattacaaaaaaacttgaagattttaattattttaccgctattatttttaattattagcgctattgttacatttttcgtcttatcacctaaatatcaagctaatactcaaattttagtgaatcaaactaagggtgacaatcctcagtttatggcacaagaggttcaaagtaatattcaacttgtaaatacgtataaagaaattgttaaaagtcctagaattttagatgaggtgtcaaaggacttaaatgataagtattcaccatctaaattgtcgagtatgttgacaattacaaatcaagaaaatacgcaacttatcaacatccaagttaaaagtggtcataaacaagattcggaaaaaattgcgaatagcttcgctaaagttacaagtaaacaaataccgaagattatgagtgtggataacgtatcaattttatctaaagcagacggtacagcagttaaagtcgcaccaaaaactgtagtgaatctaatcggtgcattctttttaggattagttgtcgcgcttatatatatcttcttcaaagtaattttcgataagcgaattaaagatgaagaagatgtagagaaagaattaggattgcctgtattgggttcaattcaaaaatttaattaaggatggttgctacttatgtcaaaaaaggaaaatacgacaacaacactatttgtgtatgaaaaaccaaaatcaacaattagtgaaaagtttcgaggtatacgttcaaacatcatgttttcaaaagcaaatggtgaagtaaagcgcttattggttacttctgaaaagcctggtgcaggtaaaagtacagttgtatcgaatgtagcgattacttatgcacaagcaggctataagacattagttattgatggcgatatgcgtaagccaacacaaaactatatttttaatgagcaaaataataatggactatcaagcttaatcattggtcgaacgactatgtcagaagcaattacgtcgacagaaattgaaaatttagatttgctaacagctggccctgtacctccaaatccatctgagttaattgggtctgaaaggttcaaagaattagttgatctgtttaataaacgttacgacattattattgtcgatacaccgccagttaatactgtgactgatgcacaactatatgcgcgtgctattaaagatagtctgttagtcattgatagtgaaaaaaatgataaaaatgaagttaaaaaagcaaaagcacttatggaaaaagcaggcagtaacattctaggcgtcattttaaataaggcaaaagtagataaatcttctagttattatcactattatggagatgaataagtatgattgatattcataaccatatattgcctaatatcgatgacggtccgacaaatgaaacagagatgatggatcttttaagacaagcgacaacacaaggtgttaccgaaatcattgtaacatcacatcacttacatcctcgatataccacacctatagaaaaagtgaaatcatgtttaaaccatattgaaagcttagaggaagtacaagcactaaatctaaagttttattatggtcaggaaataagaattaccgatcaaatccttaatgatattgatcgaaaagttattaccggtattaatgattcacgctatttactaatagaatttccatcaaatgaagttccacactatactgatcaattatttttcgaattacagagtaaaggctttgtaccgattattgcacatccagagcggaataaagcaataagtcaaaaccttgacatactatacgatttaattaacaaaggtgctttaagtcaagtgacaacggcgtcattagcgggtgtttccggtaaaaaaattagaaaattagcaattcaaatgattgaaaacaatctgacacatttcatcggttcagatgcgcataacacagaaatcagaccgttcttaatgaaagacctatttaatgataagaaattacgtgattattatgaagatatgaacggatttattagtaatgcgaagttagttgttgatgataaaaaaattcctaaacgaatgccacaacaagattataaacagaaaagatggtttgggttataaacagcaaatgaggggttttatggcacatttatctgtgaaattgcggcttttaatactagcattaatcgattcactgatagtgacattttcagtattcgtaagttattacattttagaaccgtatttcaaaacatattctgtcaaattattaatattggcagctatatcactattcatatcgcatcatatttcagcatttatttttaatatgtatcatcgagcgtgggaatatgccagtgtgagtgaattgattttaattgttaaagctgtgacgacatctatcgttattacgatggtggtcgtgacaattgttacaggcaatagaccgttttttagattgtatttaattacttggatgatgcacttgattttaataggtggctcaaggttattttggcgtatttatcggaaataccttggaggtaagtcatttaataagaagccaactttagttgttggtgctggtcaagcaggttcaatgctgattagacaaatgttgaaaagtgacgaaatgaaacttgaaccggtattagcagtcgatgatgacgaacataaacgcaatatcacaattactgagggggtaaaagtacaaggtgaaattgcggatattccagaactagtgaggaaatataagattaaaaaaatcatcattgcaattccaactattggtcaagagcgtttgaaagaaattaataatatttgccatatggatggcgttgagttattgaaaatgccaaatatagaagatgtcatgtctggtgagttagaagtgaaccaacttaaaaaagttgaagtagaagatttactaggcagagatcctgttgaattagatatggatatgatatcaaatgaattgacgaataaaactattttagttacgggtgcaggtggttcaataggatcagaaatttgtagacaagtttgtaatttctatccagaacgtattattctacttggccatggtgaaaacagtatttatttaatcaatcgtgaattgcgaaatcgcttcggaaaaaatgttgatatcgttcctattatagcggatgtgcaaaatagagcgcgtatgtttgaaattatggaaatgtataaaccatacgcagtttatcatgcagcagcacacaagcacgtgccgttaatggaagacaacccagaagaagcagtacgtaataatattttaggtacgaaaaatactgctgaagctgctaaaaatgcagaggtaaagaaattcgttatgatttctacggataaagccgttaatccacctaatgtcatgggagcttcaaagcgaattgcagaaatgattattcaaagtttaaatgatgaaacacatcgaacaaattttgttgcagtgagatttggtaatgtacttggatcaagagggtctgtgattccacttttcaaaagtcaaattgaagaaggtgggccagttactgtgacacatcctgaaatgacacgttactttatgacaattcctgaagcttctagactagttttgcaggcaggggcattagcagaaggtggcgaagtatttgtgctagatatgggagaaccagtgaaaattgtagatttggcacgtaatttaattaagctaagtggtaaaaaagaagacgacatacgcattacttatacagggattagacccggcgaaaaaatgtttgaagagcttatgaataaagatgaggttcatcctgaacaagtatttgaaaaaatttatcgtggcaaagtacaacatatgaaatgtaatgaagttgaagcgattattcaagacatcgtcaatgactttagtaaagaaaaaattattaactatgccaatggcaaaaagggagataattatgttcgatgacaaaattttattaattactgggggcacaggatcattcggtaatgctgttatgaaacggtttttagattctaatattaaagaaattcgtattttttcacgcgatgagaaaaaacaagatgacattcgaaaaaaatataataattcaaaattaaagttctacattggtgatgtgcgtgatagtcaaagtgtagaaacagcaatgcgagatgttgattacgtattccatgcagcagctttgaaacaagtgccgtcatgtgaattctttccagttgaggcagtgaagacaaatattattggtacagaaaatgtcttacaaagtgctattcatcaaaatgtaaaaaaagtcatatgtttatctacagataaggcagcgtatcctattaatgctatgggtatttcgaaagcaatgatggaaaaagtattcgtagccaaatcaagaaatattcgtagtgaacaaacgcttatttgcggtacaagatacggtaatgtgatggcttcaagaggatcagtaattcctttgtttatcgataaaatcaaagctggagaacctttaacgattacagatcctgatatgacaagatttttaatgagcttagaagatgcggtagaactagttgttcatgcatttaagcatgcagagacaggcgatattatggttcaaaaagcaccaagctcaacggtaggggatcttgctaccgcattattagaattgtttgaagctgataatgcaattgaaatcattggtacgcgacatggagagaaaaaagcagaaacattgttgacgagagaagaatacgcacaatgtgaagatatgggtgattattttagagtgccggcagactccagagatttaaattatagtaattatgttgaaaccggtaacgaaaagattacgcaatcttatgaatataactccgataatacacatattttaacggtggaagagataaaagaaaaacttttaacactagaatatgttagaaacgaattgaatgattataaagcttcaatgagataggagagattgacgttgaatattgtaattacaggagcaaagggttttgtaggaaaaaacttgaaagcagatttaacatcaacgacagatcatcatattttcgaagtacatcgacaaactaaagaggaagaattagagtcagcgttgttgaaagcagactttgtcgtgcatttagcgggtgttaatcgacctgaacacgacaaagaattcagcttaggaaacgtgagttatttagatcatgtgcttgatatattaactagaaatacgaaaaagccagcgatattattatcgtcttcaatacaagcaacacaagataatctttatggagagagtaagttgcaaggtgaacagctattaagacaatatgccgaagagtatggcaatacggtttatatttatcgatggccaaatttattcggtaagtggtgtaagccgaattataactcagtgatagcaacattttgttacaaaattgcacgtaacgaagagattcaagttaataatcggaatgttgaactgacgctaaactacgtggatgatatcgtcgctgaaataaaacgtgctattgaaggaaatccaacgattgaaaatggtgtacctacagtaccaaacgtatttaaagtgacattgggagaaattgtagatttattatacaagttcaaacagtcacgtctcaatcgaacattgccgaaattagataacttgtttgaaaaagatttgtatagtacgtatttaagctatctacctagtacagactttagttatcccttacttatgaatgtggatgataggggttcttttacagaatttataaaaacaccggatcgtggtcaagtttctgtaaatatttctaaaccaggtattactaaaggtaatcactggcatcatactaaaaacgaaaaatttctagtcgtatcaggtaaaggggtaattcgttttagacatgttaatgatgatgaaatcattgaatattacgtttctggcgacaaattagaagttgtagacataccagtaggatacacacataatattgaaaatttaggcgacacagatatggtaactattatgtgggtgaatgaaatgtttgatccaaatcagccagatacgtatttcttggaggtatagcgcatggaaaaactaaaattaatgacaatagttggtacaaggcctgaaatcattcgcttatcatcaacgattaaagcatgtgatcaatattttaatcagatattagtacacactggtcaaaattatgattatacattgaatcaaattttctttgatgatttggaattaagacaaccggaccactacttagaggcagttggaagtaacctcggagaaacgatggggaatattattgctaagacatatgacgttttattacgcgaacaaccagatgcacttttaattcttggtgatacaaatagttgtttagcagcagtatctgctaaacgattaaagattcctgtgttccatatggaagcgggtaatagatgctttgatcagaatgtacctgaagaaatcaatcgtaaaattgttgaccatgtcagtgatgtgaatctaccttatacggaacatagcagacggtatttattagatgaaggcttcaataaagcgaatatctttgtgacaggatcaccgatgacagaagtgatagaagcgcatcgagataaaattaatcacagtgacgttttaaataaactaggattagaaccgcaacaatacattttagtatctgcgcatagagaagagaatatcgataatgaaaagaattttaaatcattaatgaatgcgataaatgatattgccaaaaagtataaaatgcctgtgatttattcaacgcatccaagaagttggaagaaaattgaagaaagtaaatttgaatttgatccattagttaaacagttaaagccatttggtttctttgattataatgcattgcaaaaagatgcgtttgttgtgctatcagatagtggaacattgtcagaagagtcgtctattttgaagttccctggtgtccttattcgaacttccacagaaagaccggaagtactagataaaggtacggttattgtaggtggtattacctataacaatctaatccaatccgttgaactagccagagagatgcaaaacaataacgaaccgatgattgatgctattgattataaagacactaacgtttcgacaaaagtagttaaaattattcaaagctataaagatattatcaatcgaaatacttggaggaaatgacgatgaggatagcgattgaaaagataattggtttgctgaaaaaccagtcctctaaagaatcgaatgttaagattcatcgcttggcgtatattacaaactcaaaatttgatggcaataactatatagatagatggtgtaaaatcaggaattctcacattggtgaatacagttatattggatttggtagtgattttaataatgtagaagtaggaaggtattgttcgatatcttcggatgtaaaaattgggttaggaaaacatcctacacacttttttagctcatcaccgattttttattctaataataatccatttaacataaagcaaaagtttatagactttaatgaccaaccaagctgtacaacaattgaaaatgatgtgtggattggtgcaaatgtaattattatggatggtttaacaataaatactggtgcagtcatagcagccggctcagttgttactaaaaatgtaggagcatatgaggttgttggtggggttcctgcaaaagtgattaagaagcgatttgacaataaaacaattgaaaaacttttagaaagcaagtggtgggagaaaacgcctgacaaactaaaaggattttcggttgaatatttaaataaaaaggatacttaatgatatgagaattttaaatattgtatcgagtaatattgttcaagacccaagggtacttaaacaaatagaaacaattaaaggcgttacgaatgattataaaattgttggaatgaataattcacaagctactaataagcgattggaaaatttagattgtaattatcgtttgttaggtagcaaggtagatccaaaaaatattctttctaaattaattaagcgtataagatttgcaataggtgttatccgagaaattaaagcttataaacctgacgtgattcatgcaaatgatttcgacgtattattaatggtttatttaagcaattataaaaaagctaatattgtttatgatgcgcatgaaatatatgcgaaaaatgcctttattaataaagttccacttatttcaaagtttgtagaaagtatagaaaaacacattgtaaaacatcgtgttaatgccttcgtaacagtaagtcatgcagcaaaagaatattatcaatctaaaggatataagaaggaagcgaatgttattacgaatgcacctattttaaatgatagcagagaatttaaagaaatcgaaaactttaaatcaatcgtatatcaaggtcaaattgtaatggatagaggatatgaagagtttattattgcttcatcagcttttaaacaaaatgccccttcatttataattcgagggtttggtccgcatgaaaaagtgataaaagaactgattagttataacccggaaaatattaggttggataaaccagttgaagtaaaagaattggttgataagttagcagaaagtaatgttggtgttgtcttgacgaaacctgtatctattaattttgaatatacagtatctaataaaatttttgaatgtatacatgctggtttaccagtaattttatctcctgtcaaagagcatatttatctcaatgaaaaatataaatttggcattgttctaaaggaagttacgccgttagaaattgaaaaggcggttagaaaactaagagataatcacgatttgtttaatcatttacgtcaaaatgcaattaaggcgtctaaaattttgaattggcaaatagaaagtgaacgattagtagaattatataaattttaaagagaggtagactatgaaattttttgtactttgtgcaattatcagcatgaacatatttttagtaatctctacatttactaaagaagtattaggattccctatagagccggtgtattactcaaccatggttggtatagcattaattactacggtgtttgctatttataagataattgtcacgcaagaaattccgagagggttaatattattaattgctatatgtttgctttatctagctttttattatttttcaccagataaggaagagaaactagctaaaaataatattctattctttttaacatgggcagttccagcggcaattagtggtatttatattaaatatataaacaaggttacagtagaaagattttttaaattagtatttttcatattttctgtttcatttatttttgtaattttaataccaaaacttacaggtgagatacctagctatatcaattttggacttatgaactatcaaaatgcttcgtacctttcagcatttactgccggattaggcatttatttcattatgaaaggctcagttaaacataagtggatatatgttctatttacaataattgatatccctattgtgtttataccaggagggcgtggaggtgctattttattaattctttacggcttgtttgcatttatacttattacgtttaaaagaggaatacctatagcagtaaaaagcattatgtatatttttgcattaagcatatctagtgtattgatttactttctttttacaaaaggttcgaatactagaacattttcatatctacaaggtggaacacttaatttagaaggtacttctggaagaggaccgatttatgaaaaaggtatttactttattcaacaaagtccgttattaggctatggaccatttaactactataaactaatcggaaatataccacataacatcattattgagttgattctatcatttggcttattagggttttttatcataatgatttgcattttgttactagtttataaaatgattaggaactatgatccaaacactatagatttactcgttatgtttatagcaatctatccaatcacattattaatgtttagttcaaattatttagttgtaagtgaattttggtttgtgttgttctattttattacaaaaggacggcgtcatcatggctaagaaagtttttattatggatagcgtaaagacaataattggtacgttgcttatagctttaggattacaatttttagcttatccaattattaatcaacgagtaggtaatgaagcgttcggttctattttaacgatttatacaataataacaatcacgagtgttgtattaggcaatacgcttaacaatatacgattgattaatatgaatctatacaaatccaatcattactactggaaatttgcatcgatacttttaatctcaattctgattgagagtatagctttaattattgtatttctttacttttttaatttgaacatcatcgatattatctttttaattctacttaatattttaatgtgtttaaggatttatctgaatgtattttttaggatgactttaaaatataatcagattttgtatattgctcttattcaatttttaggtttgctgataggactatttctatattatttaacccaaaactggattgtttgttttattaccagtgaattgtttgcaacgatatatacattggttaaattacggggattaactataggcgagtatcaaagtgaagataataatgtggtaaaagattatgtgatgctactgagtacaaatagccttaataatttgaatctctacttagatagattaatcttattaccaattataggtgggacagctgtaactatatcatttctttcaacatttattgggaaaatgttagctacatttctgtatccgattaataatgtagtactttcatatatttctgtaaatgaaagtgacaatataaagaaacaatatttgaaaactaatctatttgctatagctgccctatgtttagtcatgattatttgttatccaattacaataattattgtctctttactgtataacattgattcaagtttatattcgaagtttattattttaggtaatataggtgttttattcaatgcagtgagtattatgatccaaactttaaatacaaaacacgcatcaataacattacaagcgaattatatgacgcttcacacgattacatttatattcataactattttaatgacaatggcgtttggtttaaatggattcttttggacaacgctgttcagcaacattattaagtatgtgattttaaatattataggtttaaagtctaaattcattgataaaaaggacgtcgattagatgagtgaaaaaaagattttgattttatgtcagtatttttatccggaatatgtatcttctgcgacgttaccaacacaattggcggaagatttaattgcgaatcacattaatgtcgatgtcatgtgtggatggccatatgaatatagtaatcataaacaggtttctaaaaccgagatgcatcgtggtattcgcattcgacgtctaaagtattcgaggtttaataacaaaagtaaggttggaaggatcatcaatttctttagtttattttcaaaattcgtgattaatatacctaaaatgttgaaatatgatcagattcttgtttactctaatccaccaatcttgccattaataccagacgttctacacagactgcttaagaaaaaatattcttttgtggtgtatgatatagcacctgataatgcgattaagacaggtgcaactcgtccaggtagcatgattgataaactgatgcgttacattaatagacatgtctacaagaatgctgaaaatgtcattgtccttggtacggaaatgaaaaactatttagtaaatcatcaaatttctaaaaatcctgacaatattcatgtgattcctaactggtatgacatgcgtcagttacaagacaatcatatctataatgacacatttaaaacttaccgtgagcaatacgacaaaatattattgtatagcggtaatatggggcagttacaggatatggagacacttatctcatttttaaaattaaataaggatcagcctcaaacgttaacaatactttgtggtcatggtaagaaatttgcagatgtcaaaacggcaatagaagaccatcgtattgaaaatgttaaaatgtttgagtttttaacaggtacagactatgctgacgtattaaaaattgcggatgtatgtattgcatcgctgattaaagaaggcgtcggtttaggcgtgccgagcaagaattatggctaccttgcagctaagaagccattggtactcatcatggataagcaatctgatatcgttcaacatgttgaacaatatgatgcgggtatccaaattgataatggcgatgcacatgccatttataacttcatcaacactcactcgagtaaggaattgcacgagatgggtgagcgcgcacatcaattgtttaaagataaatatacgagagaaattaatactatgaagtattacaatctgttgaagtgaggagataattatgaagcgattattcgatgtagtgagttcaatatatggtttagtagttttaagtccgattctgttaattacagcattactaattaaaatggaatcacctggaccagccattttcaaacaaaaaagaccgacgattaataatgaattgtttaatatttataagtttagatcaatgaaaatagacacacctaatgttgcaactgatttaatggattcaacatcgtatataacaaagacagggaaggtcattcgtaagacctctattgatgaattgccacaattattgaatgttttaaaaggagaaatgtcaattgtaggtcctagaccagcgctttataatcaatacgaattaatcgaaaaacgtacaaaagcgaacgtgcatacgattagaccaggtgtaacagggctagctcaagtgatggggagagatgatattactgatgatcaaaaagtagcgtatgatcattattacttaacacatcaatctatgatgcttgatatgtatatcatatataaaacaattaaaaatatcgttacttcagaaggtgtgcatcactaatgagaaaaaatattttaattacaggcgtacatggatatatcggtaatgctttaaaagataagcttattgaacaaggacatcaagtggatcaaattaatgttaggaatcaattatggaagtcgacctcgttcaaaggttatgatgttttaattcatacagcagctttggttcacaacaattcacctcaagcaaggctatctgattatatgcaagtgaatatgttgcttacgaagcaattggcacaaaaagctaaagctgaagacgttaaacaatttatttttatgagtactatggcagtttatggaaaagaaggtcaggttggtaaatcagatcaaattgatacacaaacaccaatgaaccctacggccaattatggtatttccaaaaagttcgctgaacaagcattacaagagttgattagtgattcgtttaaagtagcaattgtgagaccaccaatgatttatggtgcacattgtccaggaaatttccaacggttaatgcaattgtcaaagcgattgccaatcattccaaatattaacaatcagcgtagtacattatatattaaacatctgacagcatttattgatcaattaatatcattagaagtgacaggcgtgtatcatcctcaagatagtttttactttgatacatcgtcagtaatgtatgaaatacgtcgccaatcacatcgtaaaacggtattgatcaacatgccttcaatgctaaataagtattttaataagttgtcggtctttagaaaattattcggcaatttaacatacagcaatacattatatgaaaataataatgcgcttgaagttattcctggaaaaatgtcacttgttattgcggacatcatggatgaaacgacaaccaaagataaggcataagtaatctattaaataaaatcaacatacaaatcgttttatttggaggttatagtatgaagttaacagtagttggcttaggttatattggtttaccaacatcaattatgtttgcaaagcatggcgtcgatgtgcttggtgttgatattaatcagcaaacgattgataagttacaaagtggtcaaattagtattgaagaacctggactacaagaggtttatgaagaggtactgtcatcgggaaaattgaaggtatctacaacgccagaagcatctgatgtttttatcattgccgttccgacaccgaataatgatgatcagtaccggtcatgtgacatttcgctagttatgcgtgcattagatagtattttaccatttttagaaaaaggaaataccattattgtagagtcgacaattgcgcctaaaacgatggatgattttgtaaaaccagtcattgaaaatttagggtttacaataggtgaagatatttatttagtgcattgtccagaacgtgtactgccaggaaaaattttagaagaattagttcataacaatcgtatcattggcggtgtgactaaagcttgtattgaagcgggtaaacgtgtctatcgcacattcgttcagggagaaatgattgaagcagatgcacgtactgctgaaatgagtaagctaatggaaaacacatatagagacatgaacatttctttagctaatgaattaacaaaaatttgcaacaacttaaatattaatgtattagatgtgattgaaatggcaaacaaacatccgcgtgttaatatccatcaacctggtccaggtgtaggcggtcattgtttagctgttgatccgtactttattattgctaaagaccctgaaaatgcaaagttaattcaaactgggcgtgaaattaataattcaatgccggcctatgttgttgatacaacgaagcaaatcatcaaagcgttgagcgggaataaagtcacagtatttggtttaacttataaaggtgatgttgatgatataagagaatcaccagcatttgatatttatgagctattaaatcaagaaccagacatagaagtatgtgcttatgatccacatgttgaattagattttgtggaacatgatatgtcacatgctgtcaaagacgcatcgctagtattgattttaagtgaccactcagaatttaaaaatttatcggacagtcattttgataaaatgaagcataaagtgatttttgatacaaaaaatgttgtgaaatcatcatttgaagatgtatcgtattataattatggcaatatatttaattttatcgacaaataaaatgtgtcaaactagggcatacatgattaaggaaagataagctgtcatgtgtttgaacttcagagaggataatgttatgaaaaaaattatggttattttcggtacgagacccgaagcaataaaaatggcaccattagtaaaagaaattgatcataatgggaactttgaagcgaacattgtgattacagcacaacatagagatatgttagatagtgtgttaagtatatttgatattcatgctgatcatgatttaaatattatgcaagatcaacaaacgttagcgggccttacggcgaatgcgcttgctaaacttgatagcatcattaatgaagaacagccggatatgattttagtacatggtgatactacaacgacttttgtaggaagtttggcagcattttatcatcaaattccggtcggacatgtagaagctggacttcgaactcatcagaaatactcaccatttcctgaagagttaaatcgagtcatggtaagtaatattgctgaattgaattttgcgccaacagtaattgcagctgaaaatttactttttgaaaacaaagacaaagagaggatctttattactggaaatacagttattgacgcattgtcaacaacagttcaaaatgattttgtttcaacgattattaataaacataaaggcaagaaagttattttactaacagcgcatcgtcgtgaaaatattggagaaccgatgcatcagatttttaaagcagtaagagatttggcagatgaatataaagatgttgtcttcatttatccaatgcatcgtaatccaaaggtaagagcgattgccgaaaaatatttatctgggagaaatcggattgaattaattgagccattagatgcgattgagttccataattttacaaatcaatcgtacctcgtgctgacagattctggtggtattcaagaggaggctcctacatttggaaaacctgtgttggtattaaggaatcatacagagcgtcccgaaggcgtagaggcgggaacatcgagagtaattggcacagattatgacaatattgttcgaaatgtgaaacaattgattgaggatgataaagcgtatcaacgtatgagtcaagcgaataatccatatggtgatggacaagcatcacgacgtatttgtgaagcaatagaatattattttggattgcgttcagacaagccggatgaattcgtacctttacgtcgcaaataataaaaacccctaatcatgaagttggtttagacaaccagcggtgactaggggtttttaatatgtttatttttgatagtggtagccaatatcatatttgaatactttatttgataatattggactttgctgtccatcgtcatcactttttaaacgtacatttttatgagcttctttaaatacatcggaattcaaccaattattaaagctatcttcagattcccaaatagttaagattttaacttcgtctgtatcctcggtatttaatgttttagtgacaaacatttgttggaagccttcaatagtttcaataccttgtctattgtaaaaacgttcaatcgtttcttccgcactgcctttttgtaattgtaatctattttctgccataaacatgggcaatcactcctctattttattatttgatttgggtaatgtttttacaaatgtaaagagtacagcggtttgtatgataaccattatgattaatcctatacggactgcaagaacatccaccatataaattgaaaaacctattacaatgtataagctaattaaaattttaattttctgttgtagcgtgtagcctcgatgtaaataaaagttttctacatattctttataaattttttgattaataagccaattgtaaaagcgatctgaacttcgagcaaaacaaaaaactgctacgagtaaaaaaggggtcgttggcagtaaaggtaatacggcacctgcaataccaagcgctgtaaatattaagccaatgacgattaaaataagtcgcattgaaaaaactccattctagtactaatgcgcatgtaatattgttttagtaatataactcatgctaaatataatgtgtatgataagtgcaatgactcagtaaaatgaaacgttgttgaattatccttgtcccattaacgcattttaagcgcgactttcataacaaccaaactatttaatgagaattattctcaagtattatagttatattatgtgttttatttttgaaaagtgcaatatgttttcgaaaataagattatttttatgtgcaaaaacgacgcaaaagttttaaaaatgagacttctgtgagctgattattttataaaatgtaaacgcttactatataatgtgaatcatatcgtttaaaagcattattaaatatgatgctaagagatttatattatagccaataaacaaaggagagataatatggcagtaaacgttcgagattatattgcagagaattatggtttatttatcaatggggaatttgttaaaggtagcagtgacgaaacaatcgaagtgaccaatccagcaactggagaaacactatcacatattacaagagcaaaagataaagatgtcgatcatgcagtcgaagtggcgcaagaggcatttgaatcatggtcattaacttctaaatcagaacgtgcacaaatgttgcgtgatattggtgataaattaatggcacaaaaagataaaattgcaatgattgaaacattaaataatggtaaaccgattcgtgagacaacagcaattgatattccatttgctgcaagacatttccattatttcgcaagtgttattgaaacagaagaaggtacagtgaatgatatcgataaagacacaatgagtatcgtacgacatgagccgattggcgtcgtaggtgctgttgttgcttggaacttcccaatgctattagctgcatggaagattgcgccagccattgctgcaggtaatacaattgtgattcaaccttcgtcttcaacaccattaagtttattggaagttgctaaaattttccaagaggtattacctaaaggtgttgtcaatatactaacgggtaaaggttcagaatcaggtaatgcaattttcaatcatgatggtgtagataaattatcatttacgggctcaactgatgtaggttatcaagttgccgaagctgcagcaaaacatctagtacccgctacattagagcttggtggtaaaagcgccaatatcatattagatgatgctaatttagaccttgcagttgaaggtattcagttaggtattttattcaaccaaggtgaagtatgtagtgcaggttctcgattattagttcatgaaaaaatttatgatcaattggtgccacgtttacaagaggcattttcaaatattaaagttggaaatccacaagatgaagctacacaaatgggtagtcaaactggtaaagatcaattagataaaattcaatcatatattgatgcagctaaagaatcagatgcacaaattttagcaggtggacatcgcttaactgaaaatgggttagataaaggattcttctttgagccgacattaattgctgtgccagacaatcatcacaaattagcacaagaagaaatatttggaccagtgttaacagtgattaaagtgaaggacgatcaagaagcaattgatatagctaatgattcagagtatggtttagctggcggcgtattttctcaaaatatcacacgtgcattaaatattgctaaagctgttcgtacaggacgtatttggattaatacttacaaccaagtaccagaaggcgcaccatttggtggttataaaaaatcaggtatcggtcgagaaacttataaaggtgcgttaagtaactatcaacaagttaaaaatatttatattgatacaagcaatgctttaaaaggtttgtactagaataaatatcgtttctgaagcgtgtttgtaggcagtctagcggtaagtcttagcatgtttacggagttgtttagattttaagcgaaacaaaatatttaggaacttgcataatgatactaggatataatgactaaaataatagcagtaggatggtttttaattgcaaatcatcttactgctgtttttacttatgctaatttgcgatgcggctattataaggacagatttgtttatgaattatggtgatttagaaatatgaagttcaatatgcaaagtcatcgtttgttttaatatgcggaacaatcattaaagttattgcgattttttgaacttaatgaaactaaacaataaatttgagaaacttttttgtcatttttatgtaattatccctatcatatcggaaatgtttaaaaatttctatatgatagggataaagcaaagcgcgagtgtgctgtaaaagtttttccaaggtgatattacataaaggtataaagggtaaagattaatgagttgtcatgtaaagaacgatgatgtataaattatggttaattacggaagcattaatactaacctgagaagctataaagaattatttttaaaagcgacaatattaaatacgacgcatttatttaggagtggcaaactatgaacgggaaaaaggcgaatacgataaacagatacaaatattttcatcatgtcgatcatcaaaaaattcaacaaagttctaaaaagacgctatgggcatcacttatcatcacactattatttacagtgattgaatttgttggaggtttagtatctaattcattagcattgctgtcagactcatttcatatgcttagtgatgtattagcactcggtttgtcaatgttggcaatttattttgctagtaagaagccaactgcacgctacacattcggatatttaagatttgagatattagctgcatttttaaatggtttagcattaattgtaatttcaatctggattttatatgaagctattgtacgtattatttatccgcaacccattgaaagtggcattatgtttatgattgctagtattggtttactcgtcaatattattttgactgttatccttgtaaggtctttaaaacaagaagacaatatcaatattcaaagtgcattatggcatttcatgggagacttattgaactctattggtgtcatcgttgcagttgtattgatctactttacaggatggcgcatcattgacccaatcattagtattgtaatttcactcatcattttacgtggtggttataaaattacgcgtaatgcgtggttaattttaatggaaagtgtgcctcaacatttggatactgatcaaattatggcagatataaaaaacatagatggcatattagatgtacatgaatttcatttgtggagtattacaacagaacattattcattaagtgcccatgttgtgttagataaaaaatatgagggcgatgattatcaagcgattgatcaagtatcatcattgttgaaagaaaaatatggcattgcacattcaacgttgcaaattgaaaacttacaattgaatccattagatgagccatacttcgacaaattaacataaataaaacattgttgcgcctaaaacattaatctatgtcataggcgcacgtttcgttttatacttatgttgcatcatctaaatgattttcgtcgatgtctttgatggtatttacatctaacacgacatctttaggtttcaaaatatgaatatgtttttcatcatttgtatgtaaaatgcgttctatgatgtacctttgaccggtcattgtttctacagcaatctttttgtttcttgctaaacttgctacgacagattctttatccataatgatagccccctatatatatctttatttacttataccctaacattatttttacactctttgaaaatatattttaaagaattttatctaaatatttaaaaaaatcgctcaatatccttgtaatccgataagaattatagtaatattttttcaaccattgttataggaggtcttattaatgacattatttttattagaagctaacaatcttgattttgcatcaacgaaagaagaactagaagcaaaggcatcatcactatctacgaagacaattccaacattaattgaagtacaagctactgaaaatttaactcatggttattttattgtggaagcaaatgacgaagcagaagctaaacaatttttaacagaagcaggtattagcattcaattagtcaaagaagtacgcttagttggtaaagatttagatgaagtaaaaaatggtgatgcacatgttgattaccttgtaacttggaacattccggaaggcattacgatggatcaatatttagcacgtaaaaagaaaaattctgttcattatgaagaagtgccagaagttgaatttaaacgcacatatgtatgtgaagatatgtctaaatgtatttgtttatacaacgcacctgatgaagaagcggtacgtcgcgcgcgcaaagcagttgatacaccgattgatggcatcgaaaaactttaataagacaacaagttgatgatatatatgtatataggtttggcgtggatttcgattgcagttaattagaatagttcaatgctataaatgtaagtagttgatatgacgaaactaatgaactaaatgcaagttttgtctaaaacaatcattttattgaaatttagtagagctgaaattaatataacgtcgttaattgaataatgcttatgttataagagcactcataccaaaccataatcatctatagatataacaattcgcgatataagggctgtgtttggcatagccctttagatatacatttaattcttattaaaatggtagggattaaaagggggcttgtcatgattaaaatacaacaattacaacatcactttggatcacataaagtaattcataactttaatttggacattagcaagggagaaatagtcacttttatagggaaaagtggttgcgggaagtctactttactcaatatcatcggtggatttattcagccatcatctggtcgtgtcattattgataacgaaattaaacaacagccatctccagattgtttaatgctatttcaacatcataatctgctgccatggaaaacgattaatgacaacattaggattggattccaacagaaaattagtgatgaagagattaacgcacagcttaaattagttgatttagaaggcagaggaaagcattttcccgagcaattgtccggtggtatgaaacaacgtgtagcattatgtcgagcgcatgtgcataagcctaacgttatattgatggatgagccattaggtgcattagatgcatttacacgctataaacttcaggatcaactagtacaactaaaacataaaacgaaatcaactattatcttagtcactcacgatattgatgaagctatttatctttccgaccgcattgttctgttaggtgaagggtgcaatattatttctcaatatgaaattacagcatcacatccacgcagtcgtaatgatagccacctacttaagattcgtaatgacattatggaaacatttgcattgaatcatcatcaagttgaacctgaatattatttataaggagtgagtgacgatgaaaaggttaagcataatcgtcatcattggaatctttataattacaggatgtgattggcaaaggacgtctaaagaaccgtctaaaaatgcccaacatcagcaagtgattaaaattggatatttgccgattacacattcagctaatttgatgatgactaaaaaattattatcacaacacaatcatccgaaatataaattagaattagttaaattcaataattggccagatttaatggacgcattaaacagtggtcgtattgatggtgcatcaactttaatagagctcgcgatgaaatcaaagcagaagggctcgaatataaaagctgtggcattgggtcatcatgaaggcaatgtcattatgggacaaaaaggtatgcacttaaatgaatttaataataatggcgatgattaccattttggtataccgcatcgttattcaacacattatctcttacttgaagcattacgagaacaattaaagattaaaccggggcattttagctatcatgaaatgtcgccagcagaaatgccagccgcattaagtgaacacagaattacagggtattctgtagccgaaccattcggtgcactgggggaaaagttaggcaaaggtaagactctgaaacatggtgatgacgttatacctgatgcgtattgctgtgtgctagtactgagaggcgaattgcttgatcaacacaaggctgtagcgcaagcatttgtacaagattataaaaagtctggctttaaaatgaatgatcgcaagcaaagtgtagacattatgacacatcattttaaacaaagtcgtgacgttttaacacagtcagcggcatggacatcctatggtgatttaacaattaagccatccggctatcaagaaattacgacattggtaaaacaacatcatttgtttaatccacctgcatatgatgactttgttgaaccgtcattgtataaggaggcatcacgttcatgacacgtctcacaattaataaaattatattacctattatcacatttattattttcttaggcatttgggaaatggtcattattattgggcattaccaacctgtattgttacctggtcctgctcttgtaggaaaaagtatatggacttttattgttactggagaaattttccaacatttagcaattagtttatggagatttgtagcgggctttgttgtcgcattgttggttgctattccattgggcttcttgcttggaaggaatcgttggctatacaacgctatcgaaccgctatttcaattgattaggccgatatctccgatagcttgggcaccatttgttgttctatggtttggtattggtagtttgccagcgattgcgattatttttatcgctgcttttttcccaattgtgttcaataccattaaaggcgttagagacattgaacctcaatatttaaaaatagcggcaaatttaaatttaactgggtggtcattgtatcgcaatatattatttcccggggcatttaaacaaatcatggctgggatacatatggcggtaggaacaagttggatatttttagtttctggtgaaatgattggtgcacaatcgggattaggttttttaatcgttgatgcacgaaatatgttgaacttagaagatgttttagcagcaatattctttatcggattatttggttttattattgatcgattcattagttatattgagcagtttatacttagaagatttggtgaataaggagagatgatgatgactttagaaacgcttatcaaagaacaattagatcctcatttagtagaagttgatgaagggacgtattatccgagaacatttattcaacaattatttgtagatggctattttggtgaagcgacactgagaaaaaatgctgaagtaatcgaaaaagtatcgcagtcttgtttgacaacaggattttgtttatggtgccaattagctttttcaacgtatttagaaaatgccacacagccacatttaaataatgacttacaacagcaattgttatctggagaaatattaggtgctaccggattgtctaatccgatgaagtcatttaatgatttagaaaagttgaaccttgaacacacttatgttgatggacaattggttgtcagtggacgtatgccagctgtaagtaatattcaagaagaccattattttggtgcgatttcgaagcatgaatcatcagatgaatttgtcatgttcattctacgtgccaatcaagatggtatcacgcttgttgaaaaaacaaattttttaggggtaaacggctcagcaacgtatcaaattactttgaatcaagtcgtagtgccacaatcacaaattatcacgcatgatgcgaagcagtttgcggcaactattcgcccgcaatttattgcttaccaaattccaataggattaggctcaattaaaagttctttagagttaattgatgcattttcaaatgcgcaaaacggaataaatcaatatttagagtatgatgttgaaggttttaaaaaacgctatcgtcaacttagagaggaatattatgcaatattagatgacggtaacttaacttcacatttaaatgaattaatatcattgaagaaggacattggctacttattgttagatgtaaatcaagcttctgttgtcaatggtggttcaagagcatatacaccatattcaccacaagtacgtaaattaaaagaaggattcttctttgcagcattaacgccaacattaagacatttaggtaaacttgaagctgagttgaaggggtaagtgtgataagctgattttttgtttagatgcgtttgttgaaacattttttaaaataatataaatcttagtttataaacattttctgttaatttgttatatccttttaactaggaaaatatacatttcgtaataataataatcgttatcattgaaaaagtgttaataaggtgtataatgaaaatgtgaacaattaatgaacttcttattttaaagaaggtgaatactatagatacgcatactaaagaacaacaattctcgaatctagtaagatcttatcgtaaagaatacgtgggtaaaggacccaatagtattcgagtgtcgtttaaagataattgggcgattgcacatatgacaggtgttttgagtaaagttgagagtttttacctaaacgacaaacgcaatgaatcgatgctccattatacacgcacagagaagattaaacagatgtataaagaaatagatgtaaatgagatggaaagtcttgtaggcgctaagttcgtaaaattatttacagatattgatttgaatgatgatgaagtcatttcaatatttgttttcgataagtcaatagaataagtgttgctggtgtaaggtacacggtgctgtttgctaacttcgctttgaatttaacaataattcaagggggtggtatgtcaaacggtgccgtttttttgtcatatttttaaaacaagcaacatgcaacacgtactttaaggaagtcaaaatttatcatttaggagagatggatatgaaaatcgtagcgttatttccagaagcagtagaaggtcaagaaaatcaattacttaatactaaaaaagcattaggattaaaaacatttttagaggaaagaggacatgagttcattatattagcagataatggtgaagacttagataaacatttaccagatatggatgtgattattagtgcgccattttatcctgcatatatgactcgtgaacgtattgaaaaagcaccgaacttgaaattagcaattacagcaggtgtaggatctgatcatgtagatttagcggcagcaagtgaacacaatattggtgtcgttgaagttacaggaagtaatacagttagtgtggcagaacatgcggttatggatttattaatacttcttagaaactatgaagaaggtcatcgtcaatcagtagaaggtgaatggaacttgtctcaagtaggtaatcatgcgcatgaattacaacacaaaacaattggtatttttggatttggtcgaattggacaacttgttgctgaaagattagcgccatttaatgtaacattacaacactatgatccaatcaatcaacaagaccataaattgtctaaatttgtaagctttgatgaacttgtttcaacaagtgatgcgattacaattcatgcaccattaacaccagaaactgataacttatttgataaagatgttttaagtcgtatgaaaaaacacagttatttagtgaatactgcacgtggtaaaattgtaaatcgcgatgcgttagttgaagcgttagcatctgagcatttacaaggatatgctggtgatgtttggtatccacaacctgcacctgctgatcatccatggagaacaatgcctagaaatgctatgacggttcactattcaggtatgactttagaagcacaaaaacgtattgaagatggagttaaagatattttagagcgtttcttcaatcatgaacctttccaagataaagatattattgttgcaagtggtcgtattgctagtaaaagttatacagctaaatagaataaggatgctgggctagcgattaacgctttcaattttatataaatgaatcatataagcactactgctgttgtaaagatggcagtagtttttttatgattacatctaagtatagtcacggctatgttaggacaatgatttaacatttacgcacatatgtgttcacttacgcaaatgttgataaatttcacacatttggaataatatatagtcatatagtgataattttttgagtaataatatgcaagatgcattgtaaagtggacgcatttgtttgttaaataactttgtataactaaaaattctttgcttcaacgtatgatcaaataatagattttatataaatggtagtgtgtatatatgtggataggggtgtagttatcaatgaaacgtttaagtacgactttgaaagtacgattgattagcaattttttacagctaattattacgacagcatttataccgtttatagcactatatttaacagatatgttaagtcaatcaattgtcggtatatatcttgttggtttagtggttctaaaatttccattgtccattatatctggttaccttattgagatttttccgaaaaagttgctagtacttatttatcaagcgacgatggtgataatgcttgtgttcatgggcgtatttgggtcacatcaattgtggcaaattattggtttttgtgttgcatatgccatatttacaatcgtttggggattacaatttccagttatggacacattaattatggatgcaattaccgaagacgtggaacattatatttacaagattagctattggatgacgaacttatcggtagctattggggcattgttaggtggcttgatgtatggctacagtatgttactacttttcttaatagcagcttgtatatttttaattgtactctttattttatatatttggttacctcaagaccgaaatcaagtaaagcaaagtgatgacaagagacatgcaagtcgttatcaaaaattacaaataataaatatatttcgcagttataaattagttttgaaagaccgtaattatatgttattgatttcggggttcagtatcatcatgatgggtgaattttcaatctcctcatatattgctattagactaaaggatcagtttgaaacaataagtataggttcatatgatattacaggtgctaagatgttagcaatcttgctaatgattaatacggtcgtcgtcattttactcacgtattcaatctcgaaagttgtattgaaaatagattttaaaaaagctttaatcactggtttgctgatttatattgttggctatagtggtctaacctatcttaatcagtttggcttattagttgtttttatgataattgcgactgtaggtgaaattatttattcgcctatagtttcagagcaacgttttaaaattattcctaaagctaaaagaggaacatatagtgcagttaatgcattaggcattcatttttcagaaacactagctaggttagggattgtgttgggtgctttcttaacgacattacaaatgggactgtatatgtttatagttttaacaattggtgctagcatgcttgttgctggtgtattcgggggacaaaaacaagtgaatacaaattgaattgatttaaatatttattctatgcatctttttatattgaaaacctattaatttggtcgtaattaaaatagagataaatttattaagaatttgttaaaatttaaggataacaattgttttatgcgagttgtttgtttaatataaacttgcttcatggatattttgtaacaacaatattgaatttgcaatgagatatgaacaagagaaagtgattaacgagttgtagtgtgctagttatcgaatatgtatgtaatttacattgaaaaatataccaattgtaacgatgatacaagatgtattttagggtagaatatatcgctcatatgttgcgaatggtgttttatattaatcattacataacgagttaattaacatttcgtcggttatcatatcatcatgcaatttcagtaagtaatgagtattatgatatgaaagaaggactttttatgattatgggtaatttgagatttcaacaggaatattttcgtatatacaaaaataatacagaatcaacgacacaccgtaatgcgtattgggttaaactcgctaaaaatgttgaagttactaaaatgatgtatgcattatcgacaattgtgcaacaacatgcatctataagacatttttttgatgttactaccgatgacaatttaacaatgatacttcatgaatttctgccttttattgagataaaacaagttccatcttcttccgcaaactatgatttagaagctttttttaagcaagaattaagtacttaccattttaacgattcacctttattcaagtttaaattgtttcagttcgctgatgctgcatatatattattagattttcatgtgtccattttcgatgatagtcaaattgatatttttcttgatgatttatgcaatgcatatcgtggcaatactgttattaacaatactcgacagcatgcacatttaaatagaaatgatgataaagacaatcaagatgctttgcatatagcattagactcaaactattttcggctagagaataactctgacatccatatcgatagttatttaccaattaagcatccatttgagcaagctttatatcaaacgtatttgattgatgatatgacatcgatagatctggcatcgttggctgttagtgtgtatttagctaactatataatgagtcaacaacatgatgtcacattaggtatacatgtaccatcacatttaccaaatgatttacacggaaatattgtgccattaacgttaacattcgatgcaaaagatgtatgtcaacgttttacaacagattttaataaaagtgtgttgcaaaatatgtcgcaattacagtgcgcgaagtcttcactttcattagagactatttttcattgttatcatcaaatgatgtcttgttgtaatgatgttattgaggatgtacatcaaatacatgatgcacatacatctttagcggatattgaaatttttccacatcaacacgggttcaaaattatatataacagtgcagcatatgatttgctctcaatcgagacgctgagtgacttagttcaaaatatttatttgcaaattactgaagaaaatggaaataaacgaacaaccgtagatgaacttaatttgatgacagaaagtgatattcaattatatgacgatatcaatttaagtttgcctgagatagatgatgcgcaaacagttgttaccttatttgagcaacaagttgaagcaacgccgaatcatgtcgctgtgcaatttgacggagtgtttataacatatcaaacattgaatgcacgcgcgaatgatttagcacaacgtttgagaaaccagtatggtgttgaacctaatgatcgtgtcgctgtcatagctgaaaaaagtattgagatgataatagcgatgataggtgtgttgaaagctggtggggcttacgtgccaattgatccgaactatccaagtgatcgtcaggagtacattttaaaagatgcaacgcctaaagttgttatcacatatcaagtagtattcaacaataatgatgactgtattccacactttgagttggacacgattgtgtgggaagaagttgataatctttctaaatgtaacacgttagaagatcatgcgtatgttatttacacgtcggggacaactggtaaccctaaagggacactaattccgcaccgaggtattgttcgattggtccatcaaaatcattatgtaccattaaatgaaaagacgacgattttgttatcaggaactatagcctttgacgctgcaacatttgaaatatatggtgcattgctaaatggtggaaaactgattgttgctaaaacagaacaattattaaatccaatagcgttagaacaattaatcaatgaaaatgacgtcaatactatgtggttaacctcctcattatttaatcagattgctagtgaacgaatagaagtattggtaccgttaaagtatttattaattggtggagaagtattgaatgctaagtgggtggatttgcttaatcaaagaccgaagcatcctcaaattattaatggttatggaccaactgaaaatacaacatttacaacgacgtataatatacctaacaaagttccaaatcgtattcctattggtaaaccgattcttggtactcatgtttatatcatgcaaggcgagcgtcggtgtggcgttggtattcctggagaattatgtacaagtggctttgggttagctgcaggttatttaaatcagccagaattgacagcagataaatttatcaaagattcaaatataaatcagctgatgtatagaagtggtgatatcgtacgtttgttacccgatggcaacatagattatttatatcgaaaggacaaacaagttaagattcgaggatttaggattgagttgtcagaggttgagcatgcgctcgagcgtatacaaggtattaataaagctgttgttattgttcaaaatcatgatcaagaccagtatatcgttgcttattatgaagcgatgcatacattatcacataataagattaaatcacaattacgtatgaccttacctgagtacatgataccagttaattttatgcatattgagcaaattcctattactattaatgggaaattagataagaaggcattgcctatcatggactatgtcgatacggatgcctatgtagcaccgagtacagataccgaacacttgctatgccaaatttttgcagatattttacatgtgaatcaagtaggtattcatgataatttctttgaattaggtggccattcattaaaagcaacgttagtggtgaatcggatagaggcatctactgggaaacgattacaaattggtgatttattacaaaagccaactgtatttgaactagcacaagcaattgctaaggttcaagaacaaaactatgaagtgattcctgaagctatagttaaagatgattatgtgttgagctctgcacaaaagcgtatgtatttattatggaaatcaaaccataaagatacggtgtataacataccttttttatggcggttatcatcagaacttaatgtagctcaattgcgacaagcagttcagcatttgatagcgcgacatgagattctacgaacacaatatattgttgtagatgatgaggttcgacaacgtattgtggcagatgttgtagctgactttaaagaagttaacacgcattttacggatgaacaagaaatcatgcgtcaatttgtggcaccttttaatttggaaaagccaagccaaattagagtgagatacattcgaagtccattacatgcatacctgtttatagatacacatcatattattaatgatggtatgagcaatatacaattaatgaatgatcttaacgcattatatcaacataaattattgttaccacttaaattgcaatataaagactatagtgaatggatgtcgcatcgtgatatgacgaaacatagacaatattggttatctcaattcaaagatgaagtacctattttaagcttaccgacagactatgttagaccaaatattaaaacgacaaatggagcaatgatgtcatttacaatgaatcaacaaatgagacagctacttcaaaagtatgtagaaaagcatcaaattactgattttatgttctttatgagtgtggtcatgacgttgttaagcagatatgctcgaaaagatgatgttgttgtcggtagtgtcatgagtgcgcgtatgcataaaggcacggagcaaatgctaggcatgtttgctaatacgttggtatatagagggcaaccgtcacttgataaaatgtggacacagtttttacaagaggttaaggaaatgagtttggaggcatacgagcatcaagaatacccattcgaatttttagtaaatgacttagatcaatcacatgatgcctcacggaatccattatttgatgtcatgttagtactacaaaacaatgaaacgaatcatgctcattttgggcatagtaaattaacacatattcaacccaaatcagtgacggcgaaatttgatttatctttcatcattgaagaagattgcgatgattatacaatcaatatcgagtataataccgatttatatcactcagaaacagttcgtcacatgggtaatcaatgtatgattatgattgattatattttgaagcatcaagatacactacaaatttgtgatataccaaacggcacggaggaacttctaaattgggtcaatacgcatgttaacgatcgaatgcttaatgtcccgggaaataaatctatcataagttactttaatgaagttgtctcacgacaaggtaatcatgttgcgctagtcatgaatgatttgacaatgacgtatgaaacattacgcaactatgtggatgccattgcgcacatgctcctatcaaatggtgtgggcaagggtcaacgggttgctttaataacagaacgtagttttgaaatgattgcggcgatgttggcgacagttaaagtaggtgcatcttatatacctatcgatattgattttccgaaaaagcgacaaggcgcaattttggaggatgctaaagtaactgcagtgatgtcttacggcattgaaattgaaacgacattaccagtcattcaattggaaaatgctaaatgttttgttgaatcaaaggaaaatgaacaatatgatgatttacatggcgatcaacttgaaaacacagcgatgttagataatgagatgtatgctatttacacatctggtacgaccgggatgcctaaaggggttgccatacgacaacgaaatttgttgaatttagtatatgcatggtcaactgaattgcaattaggcgacaatgaagtatttttgcaacatgcaaatattgtttttgatgcatcagttatggagatttattgttgtttgttaaatggtcatacgcttgtgattccagatagagaggaacgtgttaatccagcacagttacaacacctcattaataagcatcgtgtgacggtggcatcgattccattacagatgtgtagtgttatggaagacttttatattgaaaaattgattacaggcggggcaactagtacggcatcctttgttaaatatattgagaagcaatgcggcacgtatttcaatgcctatggaccatctgagtcaacagtcatcacatcgtattggtcacatcaatgtggtgatttgatacctgagacgattccaattggcaaacccttatctaacatccaagtgtatattatgtcagatggtttgttatgcggtattggtatgccaggcgagttgtgtattgcaggtgatagtttagcgataggatatattaatcgtccagaattaatggctgataaatggcaaaataatccatttggtaaaggaaagttgtatcatagtggtgatttagcacgttatacatctgatggtcaaattgaatttttaggaagaatagataaacaagtgaaagttaacgggtaccgtattgaacttgatgaaattgaaaatgcaatattagctattcgtggtatatctgattgtgttgtcacagtaagtcactttgatacgcatgatatattgaatgcttattatgttggagagcaacaaatggagcaggatttgaagcaatatttaaatgatcatctgcctaagtatatgattcctaagactataacgcatatcgattgtataccattaaccacgaatgacaaggtggatactacgcgtttgccaaatccatcacctatacaacagtctaataaagtgtatagcgaaccatctaatgaaattgagcagacatttgttgatgtattcggagaggtattgatacaaaatgatgtcggtgttgatgatgacttctttgaacttggtggtaactcattagaggcgatgttagttgtctcgcatttaaaacgatttggccatcatatttcaatgcagacattatatcaatataaaaccgtgcgacagattgttaattatatgcaccaaaatcaacaatcattagttgcattaccggataatctttcggaattacaaaagattgttatgtctcgttataatttgggtattttagaggatagtctaagtcatcgacctctaggaaatacactattgactggcgctacaggttttttaggtgcttatctgattgaagcactacaaggatacagtcatcgcatttattgtttcatacgtgctgataatgaggaaatagcatggtataagttgatgacgaatttaaatgattatttttcagaagagacggttgaaatgatgttatcaaacattgaagtcattgttggtgatttcgagtgtatggatgatgttgttttaccagaaaacatggatacgattattcatgcaggtgctcgtacagatcactttggtgatgatgatgaatttgaaaaagtaaatgttcaaggtactgttgatgtcatacgtttggcacaacaacatcatgcaaggttaatatatgtgtctacgataagtgtgggaacttattttgatatagacacagaagatgtgacgttttcagaagcggatgtctataaaggacaactactaacatcgccatatacacggagtaaattttatagtgaattaaaagtattagaagctgtaaataatggcttagatggtcggattgtacgtgttggtaatttgacgagtccttacaatggaagatggcatatgagaaatataaagactaaccgtttttcaatggtaatgaatgatttgttacaactggattgtatcgggattagcctggctgaaatgcctgtagatttttcttttgtggatacgactgcaagacaaattgtcgcattagcacaagtcaacacgccacaaatcatttaccatgtgttatcacctaataaaatgccggtgaaatctttgttagaatgcgttaagcgcaaagaaattgaactcgtcagcgatgaatcatttaatgaaatcttacagaaacaagacatgtacgaaacgattggattaactagtgttgaccgtgaacaacaactagcaatgatagatacaaaattaacattaaaaataatggatcacatcagtgaaaaatggccaacgataactaacaattggctgtatcattgggcacaatatatcaaaacaatattcaataagtaagtagggaaagttatgacagtatttgtaatgcaattacagagtaacttgaaaagtattgaagaattaatatcacaaagtcgttggtcatataaaaaaccgcgtacagtcaactatagatacaatcaagataaactcatgcacagattgggagatattttagtgcaatatggaattcaacatgacacagggttattaccacatgaatggcattatcacatttcgccacgaggtaaggcagatatagttcaacacaatcgtgatggacagcccatctatgtgagcttatcatatagttatccttatatcgtgtgtgttgtcgataaagaaccagttggtattgatatcgaaaagatatcacaacgtttagactggcgtacattagtgacgtgtttctctacaaacgaagcacatcaaatatgtagtttaaatgatttttatcaaatatggacacaaaaagaaagttttacaaaattgattggtgaaggtttaatcaaaggattggacatttatgatatgacgcaatcacacttttatcaatcacgtgaagtgaagttcaaacaatttatttttgatcagtttatggtacaggtatgtttcttaggacaggcaccctggggttataaaaaagtgtctgtatttcagttattgagtagctaaacatggcgtctaacagtatcattgcgcagtgattttaaactatactgcctaaatgtttactgttagatgtttttttattggaaaaatgaaaggtgaatacacgatggcatcattcaaaatcatgacgagattaaagtaagtgataaggtgaaaatatactgagcaatattgaaattgccaaaaataatggcttgttacgacgcatttgagactttaatgctcatgtaagttggctagaattatatcatgtcagttaataaaataacgtgagcatcaatcatcatactcaaacgatgatttaaaactcacgttaatgttagtcagtgtattaatttaatttatagcgatagacaaaatgttgtcgcactaattcaattgtcatcatccagacgatatggccaaagaattctgacagatgctcttggaatggttgatcccacacagcaggtacagtatgcatgattggcataatgataaggtggaataatacccaaatagcaataccaaatacagcaccttgtcctattgctaagtaagcgtattttttaactaatatgcagtaaataattgcaatgacgatagaaaaactaaagtggacaataaagctcacccaaggcaattccatatttgaaaatgtatatgtttgatgcgtaaactcactactaaatcctaattgttgcaataactcttgaggtgggttcgttgcattacgttctggtgtgcgaggtggaaacatgacctcccaacctaattttacaattccagataacaagccaccgataattccagcataaatgaatatacccatttgtcgttttgtcaacttaaggactcctctctatttactatcctcattatagtattttgtgaaaataatcacaatgaaaaacttttaaaatataaaatatttaaagttacaaatttgaaaatcacttatagtgtttttcatctcatattgtatcatactatattctgaaatttcttttgtgaaatgagacaggtgaaaaggtgacgctgcataatcattaaacaaataggtacaactatgtttcgaagccgaataatacaagattgagtggtcatattcaaagtcatactgatgattttagtatcgttgtcccaacaaaatcattattataaatagcttcaatgatatttggcttgtttcctgatgcaatgataactttaggacagccattttcaatcgcatttttggcatctagcactttgggaatcatacctccataaatatcaccatgctcaatatactgatgaatatcgactaatggcaattgaggtataaccacatcattgattagcacgccagcaatattacttagtacataaataggtgcttccaatgatgctgcaataaaataggcgagtgtgtctgcatttatgttgtaaaattctccatcatggttattgaaaccaatcgaattgatgataggtacaaatttagtacataaataagacaatgagtctatatttaaagtggtcggaaccccgacatatccatattgttgatcaaaacgtttaatttcaaataattgagcatccaaaccacataagcctattgcagaacattgctgctggttaaattgagctactaatgcagtgttaacgtctgcaatgagcgtgtgtttagtaatagtcatggttgctttatcagtcactcttaggccattaacaaagtgtggctcgatttgctggtttgataatgcatcattaataaatgggccaccgccatgaacgataatagggtagatgttgtttgatcgtaaatgcttaatgttgttaataattgatgtatgcatgtcacttagtgtactgccaccaattttaatgacaataaatttcatctaaccaacaccaccttatgttcgatatgatgcgttaatacgcacataatcataggataaatcacaaccgtatgcagtcgctgcagcgttacctaaaccaagctgaacgtcaattgtgacattttcatgagttaatgtattcgacatagcttgctcatcaaatagtacagccatacctttatccacgacaggtatttggttcagttgaacatatgtgcagttaggatcaatttcacatccgctatagccaatagctgtaatgattcgaccaaaattggcatcttcgccaaaaatagctgattttactagatttgaacttacgatagttttgccgatttttcttgcatctgatattgacttagcacctgacacattgacgctgattaactttgttgcgccttcgccatctctggctatagctttagctaaaaatgtacaaacaaaattgaatgcatcaacaaatgtttcccattgtggatggtcttgactaagtatttggtgttcaacttgttgatttgccatgactaataccatgtcatttgtacttgtatcgccatcaacagtaatcatattaaatgtatggtcagtcgaagattttaataattgatgaagtgtattcgattcaattgatgcatcggttgttataaaagcaagcatggtagccatatttgggtgaatcatacctgatcctttagcactgccaccaattgtaatagttttaccatcaatatttagtgatacagcgatatgctttgtacatgtatcagttgttaaaattgcctcgttaaacgcacctggcgttgtaaaattagcatcattaatatgttctgtaccagttttaattttatccattggtaaatattctccaatgaccccagttgaagcaacagcaacatgctcagatggtatttgaagttgttgagcaacccatgtttgagtttgttgtgcatcatcgataccttgctgacctgtgcaagaatttgcattagctgaattaacaacaagtgcttgtaatttccctttagacttttgtaaagtgtcttcagtgacaataagtggtgcagctttaaattggtttaaagtatatacggcagctgaacttgctaaagacgatgagtaaatccacccaaagtcttttttgttagcgcgtaaaccgatgtgcataccaccagccgtgaagccttgaggtgtactgatatcgccatgtttaataattgaaaagttatattgttgtgatgtcgtttcttgatgtttcattctaacaccccttatggataaactggtgattgttttaggccagtcgtaacttcaaaatcatataatatatttaagttttgaatggcttgaccacttgcccctttgacaaggttatcaatcactgatactaaaattgctgtttgcgttgtttcatctacatagataccgatatcgcagtagttactaccgagtacttcttttgtggttggaaaagtcccaatatctctaattctgacaaatggctgattagcataataagaggtcattaatttatgtaatgattcagtcgtgtattcagatgataatttgacatatattgttgataaaatacctcgtgtcattggtacgagatgtggtgtaaatatgactgatacatcttgacccgcaatgatagataaatattgctcgatttcgggtttgtgtttatggcttccgattgcataagcgcttagattttcattcatttctgaaaaatgaacacgttgtgataatgaacgtccagcacctgatacaccggtcttagcatcaataataatagatgacaaatctataattttttcgctaataagaggatgtaatgctaataatgttgctgtagggaaacagccaggattagaaatgagcttcgttccattgttatcaaacgattgccattctgaaatgctatagatagcgtgatttaagtcgtcttgtgatgcagcagtttctttgtaatatgcttcatatatttcacggtttttaattctgaatgcaccagataaatcaataacatgaattcctttttctactaaaggagggatacatgttttactcacgggtgcgggtgtagcaaagaaaattacatcacagtcattattgtccactgtaagtgcttcgaaatgttgcataatatgttgtaaatgtggaaatgttaatttcaacggctcatctacttttgaatgtgagtagatgtgtgcaatcgttacatgaggatgtgtttgtaataatcgaattaattcaattgcgccataaccgctaccgccaacgatacctactttaatcatcatgaatccctcctatatcatatataaatgattaattgttaatttttaaaaacgtcttgaaaagcagcaacaatttgattgatttcctctttatcaatgactagaggtggtgacaatcgaatgatagtacgatgcgtgtctttgcataaaatgccacgtttaatcagttgttcaacgaaaggtgcggcatctgtgttaagttcgatgccaataaataaaccacgacctctaatttccttaatgcttggatgtttaagttgtagtaattcttttaataaaattgaacctaagcgttctgatcgttcaatcagttgttcattgtcaagtacatcaagcgctgccgtcgatattgcaatggctaaagggttaccaccaaatgtcgaaccatgtgtacctagtgttagaacacgcatgacatcattatttgcaagtacagcagatacagggtataagccgccacccaatgccttacctaaaatataaatgtctggaacgacttgctcccattccatagcaaaccatttcccagttctaccaagaccaacttgaatttcatctgcaatcaataatatttgatgtttatcacatagttgacgcacagcttgaatatatcctttcggtggtatattaacgccaccttcaccttgaattggttccaaaataattgctgctgtattcggtgaaatagcttgtgttaattgttcaatgtctccaaaatctactgttgtagtgccttgaagtagggggtgaaatcctgctttatatgcgtcgtggttagatagtgataatgagccaagtgtacgaccgtgaaaattgttattcatagcgatgatttcaacttgtccgtcagtgatgcctttaacttcagagccccattttctagcaattttaatggctgcttcaacagcttcagtaccagagttaagggggagtactttgtctttcttagcaagatgacaaattttttcttcccatttcccgagattgtcactataaaggacacgtgaaatgatagacaactttgaagcttgttctgtcatcgctttaacaattgttggatgacaatggccttggtttgcaactgaaaaacccgaaatgcaatctatatattgtttgccatcagtatcccaaactttgccccctttacctttagaaatgacaagcttcagtggtgcataattattagagctataataatcagttaattcaatgatagaattcatgggtctccccctcctttatatttatacattttaaagaattaatattaatatattacagttgttcaatataagtgtcaaatgtaaatttaataatttatgcataatatttctgtgtttttaaaatagagtagagttattgcgatttattttttgtgattttggaaaatatttaaatgtaatcaagatagcgatttacaagttttgtggtgtgataaaggtgataaacgatagtaataatcgaattgctttttgaaactgttacataaaaaagtacagtgctagatgaatgattagtctcaatagcactgtacttatatttatatgagcagtaacatatttaggtttaaactatttttggaatcttgggaataatttaagtgcactattatatttaatattttcaattgtttcattctttaaatcaagttgatgctttattgtattaatcattgattgatctaaattttcaggtgcatagtgagcatcgctaccgaataaaatatgatcttcaagagtagtttcttctaaggctctaaatgttgcagattgtgttgataaagcagtgtcataatagaaatcactaacataagcttcaggatcttttgctagaacaacaaattgactttcgtctgcagtttgtttgattaatttataacattcgttaattctccatgttaaatatggtaatgtaccaccggcatgtgccaaaataaatttaatgtttggatagcgatccattgtaccacttaaaattaagtttgctgcagcacgtgttgtattaaaagtaaactcagccatgaaatcaacaggcatatattttggtctaggtacataatcaggtggtgtacttggatgtataaacacgactgttgctctttcatctagtactttcattaaaggttcaaattgtggatcgcctaaaaatacttcattgtagttggataataaacctacaccatccaattgtaaattatccaaagcatatttaacttcttcaattgcactatccacatcaggtagtggcaatgttgcgaaagcaccaaaacgatttggatactctttgatgatttgtttttgtaataaattaatttctcgtgcaattgcttttcttttgcttggttcaagtggttcaacgactggatcagaaatggaagtaatccctacttcaatacccaatctatccatcatttttatgctgttttcaggttgccaattgttaatttttagaccaccggctttgtcaatcccagcttcttttaatgcgtctaggtaaaattcaggaatgatgtgatgatgaatatcaatataacctgttttatttgccataatataaatcctcctaaaacttcaaaatgaacaaattgactatttatagacaaaatgtatataattcattgtactcgcaacacaattaattgcaattcacaaaatatgttaatttgtaaattaaaatacaaatcgattaaatgtgtaaataaagtggaaaatgatagatagaggtgctgaaaatgacaaataaaaaaattgacccacgggtaaagcgaacaaatcaatatttaattaatgcaattgtaaaactactcaatgataaagatatcaataaaatatctatacaaaatattacagattcagcagatttgactcgagcaacgttttatctgcattatcgagataagcaggattttttcaatcgaattgttacaaatgttatagatgatttgatagattatgtaaaagatggacatttgatagcatctggcttaaataatgaatcagatattaaaaatgcatttacgcgattatttgaatatatttatatgaattacgagtttttcagtgtgatgttaagtgatagaggtctatcacaattcagaccgaaattagaatctgtagtacaaaaggaaatttatataccattgtttcatgcacttgttaaaatagacggtgaaaaaacaagtaaatttccacaacattattttttaaattatataacgtccgctcatattggtgttatttgtacttggttaaatgatgatatgaattatagtccgaaatatatggctgaacttctatataaactaactttagaaggtattttttcagtagtacgaagtgaattttaaataatagttgtggagaatgaagcaataggataaagcgaaatactactatatatacaggcaataatgaaaaacgccacaaaagcatacgttcaagtatacttgtggcgttatattatgcttgtggaattttacgatgcttaattttataaataatgaagccgataatgaaaccaatcaaactgagaacaacccagcccataccaatgtctgataatggtaaatatttttggctgaaattaatcaaagtttgtgagaatgatgtgcttgaaatgaactctggactagcttttaatccatctactaatgcagcaatcattgtaaagaaaatggtacattgataaataatttttgaatgatggaatttgctgctaaataatgttagtacaatcaaggcaattgctaatggatataagaacattaacactgggactgagtacataataattttagttaagccaacattcgcgaataagaatgagataaagctcacaactgttgcaatcgctaggtaattcattttagggaaaaggtgttcaaatgtttctgaaaatgccgtaattaaaccgatagctgtttttaaacaagcaaccataacgatgagtgataacaagacgataccgtagttacctaagtagtattgcgtaatttgcgctaaggcaataccaccattttcactaagtttgaaatgaccaatacttaatgtacccataattgctagtagggtataaatgatccccatcataatgatgctgatagtaccagacttaattgtttctttagcgatatcagttggattttcgatacctaactttttaatcgttgcaacaatgatgataccaaatgccaatgacgctagcgcatctaaggtattgtatccatctaaaaagccgttaaataaggcatttgattgatattgtttactaataggtgcatcagatatgccacctaatggatggataaaagcaaataataaaataattgctaataatactaagaataccggatttaaaaatttaccgatatattctaaaattcttgatggctttctcgcaaaaaaccatgcaatcacaaagaagacgaagctaaaaataaataaatataaagtgatttgctttggtgataaaaatggcgaaaatgcaatttcaaatgatgtagttgccagtctaggtaaggcgaaaaatggtccgataactagatataaggcaatcgtgaaaatgtaagcatatgttttattaacacgcgatgcaatttcaaataaaccagatgtctttgaaatgccaatagcaatgatacctaaaaacggtaagccaattgctgtaattaaaaatcctaagttagcgataaaaacgttagaaccagcagcttgacccaagtgtattgggaagataagattgccggcaccaaagaataaaccaaataacatagaacctataaacatgttttctttaaatgttagtttcttcttcatatatgtatttgttctcctttttagaacttataaaaatctacttaattaagataatatcaaaaattaaacctaaagtgatacataattttgcaataaatactaaattttttgaaaattccggaataaatactgttttttatgtagtaggggcgtaagttaagaacgatttaacagatataggctaagtttatagataggaggttagacaacccgatgtattaatactttgtgaaataaagatccccccttcaacatgatcgaaggggggaagtatatgtttagttcaatatatttagaaagtcgtttgtagttattgtttgtcccatcaatgggaatacattatctattggaaattgatgtagcgtttcgttttgtgcactcatcatgtcagtaacaaaaaactgattgtagtttaattgataggcatctcgcgctgtcgtatctacgccaatatgcgttgcgacaccaccaagaacaatcgtatcaattcctcgacgtcgcaattgtaagtccaaatctgttcctacaaatgcactaaaatgtcgtttgtctatgacaaaatcgtcatatctcttgtctaataaatgatggaaacgactgtagtcgtcgccttcttttggtggtaatgagatcattgcatttggttgcaatacatctttaccatcatagaaattcacacgaacgaatacgataaagccattgttttttctaaaaacatctattaatttattagcgttttgaacgacattttcagctgtatgtggcgcataatccatcttaagtataccttcttgcaggtcgattaacactaaagcggttttattaaaattaatcatcttatatcagagtccttttcatttaataatatatctgttaaagcttataccctgtataagatgaaattatttattttgttgcgaaaaagctttagcgatatcgatcagtttctttggtgcatcttcgacagacattttgacttcgacaaaatgcatcacatcgggatgaccattaattgcattaaacgtgtcttgtaaatcttttgatgattcaacgtcatgaatttcaacattttcaccaccaaatacagctggtaaagctttataatcccacatgtgaatttcattataaggttcatacatgccgtgaataagtcgttctaccgtatagccgtcattattaatcacaaataataccggtttaatatgctgtctaatcatagttgaaatagcttgaacagttagttgcaatgagccatcaccaattaataataagttacgacgatctttgtctgctaattgtgaacctaatgttgcaggtaatgtatagccgatagaaccccataacggttgccctataaaagtattgtttttgtataatgctaaatcataagcaccaaagaatgatgtaccttgatcagcaataatgacatcatttggttttaagaaattttgcatcattttaaaataagtttgttgttttaatggttctgtgccaacagtataatcgggtgatgttggacgatgatacgcagggaacgttgcgttattcgtatatgaaatattggataactgttttaacaatgatggcagagatatttcatcatttgtaacatcgtcaattttgatattgtgatgatttaacataacgacatcatcgatattgaattggtatgaaaaacctgctgttgctgaatctgttaatttggctccaatatttaaaattaaatcgctgttgtccacataatctcgtattttatcttcggcaattttcccatcgtaaatccccatataatatggattttcctcattaaaagcaccttttcctaatgaaagttgtgctactggtatctgtgtttgatttacaaaatcttctaattcttgatggaggtgaaaactgttaatttcatgtccagtaatgatgataggctgcttcgcttgatgcaatttagatgctaataactctatatatgttgacgcatcagtatctttggctgccgttacttcgaatggtgtcggtatttcaatttcagagattgcgacatcgattggtaaatgtaaatgaactgggcgtctttcggcgattgctgtattaattaaacgtggtatttcggttgttgcattttcaggtgtgatataaccttgtgcaacggttatatgtgcaaacatttttcggtagtcgtcaaatgtaccttcaccaagtgagtgatgtacatatttaccggcttgttcaacagcacgtgtcggcgcacctgtaatcgcaatgacaggtatgcgttcagcatacgaacctgcgataccgttgacggcacttaattcgccaacaccaaatgtagtaactaatgcagcgagtccattaagacgggcataaccgtccgctgcgtaacttgcgtttaattcatttgtatttcctacccaatctacattgggattactgataatatcgtctagaaaagcgagattaaaatcaccaggaacaccaaaaattttatcgacgcctgctcgatgaatagcgtcaattaagtaagctccaatgcgttgtttcataaaaaaaccaccttttctctatatttacacttaaaatgatagcctcgaatatagtgtaaggtcaaggaagttgactttgttgtgaaaacgctaacaatagtgagcaattaatattttttaggaaatgagtatgaagggggatttaattgatgattttaaaattcaaaatttaaggggagagcgaactatcaatgatgctgcaaaacacaataacaatgaaaaaacaggcgcgtcaccttatgaaggtatacgcacctgtttatagtaagcattatttagcttcaaataattgatcgccaaatgaaatgttgccatgttcaccttgtttaaaatcaaggtttgtaatgtttccttgtgtaacgataataggagtaatatcactctttgcatgattgcggatgtagtctaaatcaaagttgattaataaatcaccttgtttaacttcttgaccttcctcaacatgtaaagtaaagccttctccgtttaatttaacagtgtctaaaccgatgtggattaatagttctaaaccactatctgatacaagaccaattgcatgttttgttgggaaaatcatttgtactttaccgttgaatggtgcacgaacttcaccttgtgaaggtttgatagcgataccgtcacccatcattttttcgctgaacacttgatcaggcacttctgataatggtgttacttcaccagttaatggtgcatgcacgatatggctcaattcgcttgttgcagatttatcttctgcaacaacaacagtttcgtctttatcgtcttccatagtagtagggttttctactacttgaccattcataatctgttgcatttcatgtttgatttggtcagattttggaccaaaaattgcttgcatattattgccgacttctaatacaccagatgcgcctaaatctttcaaaccaggaacatcaactttagatttgtcgttaacttcaacacgtagacgtgtgatacaagcgtctaaatgtttaatgtttgctttgccacccatagcttctaatactgcatatggtaattcagttgctgaagcagtagccgcttgtgattgtttatcttcacgacctggtgttttgtattttaattttacaattaggaatcggaatacgaagtagtaaatgactgcgtatacaagacctacaggaatgactaaccaccattgtgtcttattaggtagtataccgagtaagaagtagtcgatgaaaccacctgagaatgtataacctagatgaagatctaataagtacaatgttaagaatgataaaccatcaagtactgcgtgaataaagaataataatggtgctacgaataagaatgagaattctaaaggttctgtaataccagttaagaatgatgttaaagcagcagaacccattaaaccggctactacttttttgttttcaggtttagctgtgtgataaattgctaaagctgctgcaggtaaaccgaacatcataacagggaattcaccttgcatgaatttaccagctgtcaaatgtgcaccttcacgaatttgttcgataaagatacgttggtcaccgtgaataatttcaccagctgcatttttccatgaaccaaactcgaaccagaacggtgcgtggaaaatgtgatgtagaccgaatggaattaataaacgcttaataaaaccaaataagaatacggcaacaccagtatttgagtctaataatcctgtactgaatgcatttaatcctgtttggattgttggccagattaatgccattgggaatgctaaaataaatgatgttgtagccatcataataggtacgaaacgcttaccagcgaagaaacctaaataagatggtaagttaatgttatagaacttgttataacaccaagctgccagggccccgattataataccgccgaacacacctgtttgtaatgttgggatacctaaaatgctagcgtaaccactcgctggatcaccaatgttcttaggtgttacttgtaaaaagtcacccattgttttgttcatgattatgtaaccgacgaatgctgcgatagctgctacaccatcaccgccagctaatccgattgcgacacctaatgcgaaaatcataggcaagttatcaaaaatgataccaccagcacctgtcattaatttagcgacagtttgtacgccaccattttgtataaacggcaagtagtgttgtaatgcttcgccttgcatagctgtaccgatagctaataacagacccgctgctggtaaaatcgcaacaggtaacattagtgccttaccaatacgttgcaattgaccgaaaagtttcttcctcacttgtccaacctccaaagttgtatttattatttaagattcaataaaaaagacacgagcaaatagactgtgttggtaaccatcacagcttaatttaactcatgcctaatcttacttagtaacacgttggtgtatgtaattaatgtaaaagaagcaattgactaagtagcatataaaactgatacgttagtttatctagcttaccatcacatcttattgaatcttatttgtttgcgactcctattttagcatggtgaagtatgcgttttcaatacaattattaaattcaatttcaaatctcttaattgttcacagattattattaaaacataatataagataatcctgaataaaatgtataaaagttgttgtaataatccagcaatagcaactgttttcgagcgttaaatgataagaaaaatatgtcgttttaaaaaattaacttgtgacagaaatatgtaagattattacaatgaacaggcttcaactaattaatattgtaatgtgttttctcttatagtaaaatgtaagcgattacacaactcaactatattttcctaataattatattgttaaggagggctactttgacaggcttttcagtgtatttaggacaacctttagatgaagcgtatattaagcgaatgattaaacaaggttaccaaatgatttttacatctgtacaaataccagaagaagatgacgagacaaaatatcattatttcacaaaactactcaatttattaaaacatgaacaagtgacttacctcatagatgctaatccatctatattaacaccatctttttatgagcatcttcgacaatatgatgcacaatttatgattcgtatcgatcatagtacatcaattgaggcaatcgaagcgataatggcacagggtttaaagtgctgtttgaatgcaagtattatttcccgggaattgttaacaagcttacatcaacaattgaatgattttacattactttcattttgtcataactattatccaagaccagatacgggattatctgttgacttggtcaataagaaaaatgaactcatttatcaatttaatccaaaggcacaaatatatggttttattgtagggagtgttttgcgaggtcctttgcataaaggcttgccaacaattgaagcaacgagacatagtcatcccgtcgttgcagctaaattattacaagaaactggtgtatctgaagtgttagttggagactcattgattgaaatgaggcaggcaaaacaacttatagatttttgcaagcataggcatttcacgttatgtattgaagaagtgtttgatacgacagtgacttaccttttcgatatgtgtcataaagtacgtccggataatccggagaatgtcattcgttcggaaacgtcaagacaaatatgtccgcattcgattcaaccacagtttacgacgcaacgacgcattggttcagtaaccgttgataatttgaataacggacgttatcaaggtgaaatgcaaattgtgagacaaacgcttagtgcacatgacaatgtgaatgttgttgcacaaattattaaagaagacttaccactgttaagttgtatcgagccgaatgatacatttgattttcaaaaaactagggagtgtaagaagtgatggaaaatagtacgaccgaagcgcgtaatgaagcgacgatgcatcttgatgaaatgactgtggaagaggctttaattacgatgaataaagaagatcagcaagtcccgttagcagttcgaaaggcaataccacaattgacaaaagtaattaaaaaaacaattgcacagtataaaaagggtggacgattgatctatatcggtgcaggtacaagtggaagattgggtgtcttagatgcagcggagtgtgtacctacattcaatactgaccctcatgaaattataggtattattgctggtggacaacatgctatgacaatggctgtagaaggtgcggaagatcacaaaaaattagcggaagaagatttgaaaaatatagatttaacatcaaaagatgtcgttataggaattgccgcgagtggcaaaacgccatatgttataggcggtttaacatttgctaacacaattggtgctacaacagtatctatttcatgcaatgaacatgcagttataagtgaaattgcgcagtatccagtagaagttaaagttggtccagaagtattaactggttcaacgcgtttaaagtctggtacagcacaaaaattaattttaaatatgatttcaaccatcacaatggttggtgtcggaaaagtttacgataacctcatgattgatgttaaagcaaccaatcaaaaactgatcgaccgttcagtgcgtattattcaagaaatatgtgctatcacatatgatgaagcaatggcgttatatcaggtatctgagtatgatgtgaaagttgcgacagttatgggtatgtgtggcatttctaaggaagaagcaacaagacggttattaaacaatggtgacattgttaaacgagcaatcagagatagacaaccttaggagggatttaaatgaccaaagaacaacaacttgcagaacgaattattgctgcagtaggtggtatggataatatagatagtgtcatgaactgtatgacacgtgtgcgtattaaagtattagatgaaaataaagtagatgaccaagaactaaggcacattgatggtgtcatgggtgttatacacgatgaacgcattcaagttgtggttggacctggtacagtcaataaagtggctaatcatatggcggaattaagtggtgttaaactaggtgaccaaataccacacaatcacaatgatagtgaaaaaatggactataaatcatatgcagctgataaagcaaaggcgaataaagaagcacataaagcaaaacaaaagaatggtaagttgaataaagtattgaaatcaattgccaatatctttataccattgattcctgcatttattggagctggattaattggtggtattgcagcagtactgagtaacttaatggtggcaggctatatttcaggtgcttggattacgcaacttataacagtatttaatgtcattaaagacggtatgttagcatacttagctattttcactggtattaatgcggctaaagaatttggtgcgacaccagggcttggtggcgtgattggtggtacaacgttattaacgggtattgctggtaaaaatattttaatgaatgtcttcactggagaaccattgcagcctggacaaggtggaattattggcgttatttttgccgtttggattttaagtattgttgaaaagagattgcataaaattgtgccaaatgcgattgatattattgtaacgccgactattgcattgttgattgtaggactattaactatctttatctttatgccattagcaggttttgtttcagacagtttagtttcagtagttaacggaattattagtattggtggcgtatttagtggatttatcatcggtgcaagcttcctaccattagttatgttagggcttcatcatatttttacgccaattcatatagaaatgattaaccaatctggtgctacttacttattgccaattgcagcgatggctggtgctggacaagtaggtgccgcattagcactttgggtaagatgtaaacgcaacacaacattacgtaatactttaaaaggtgcattgccagttggtttcctaggtatcggagaaccattaatctatggtgtgactttgccattaggtcgacctttcttgactgcttgtattggcggtggtattggtggcgctgtaataggtggaattggacatattggtgccaaagcaataggcccaagtggtgtgtcactcttaccattaatctcagataatatgtatttaggttatattgcaggattacttgctgcgtatgctggtggattcgtttgtacatatttatttggaacgacaaaggcgatgcgacagactgatttgttgggtgattaatgatgacaaatattttatatcgcattgataagcagttgagtgattttacgaagacagaaaagataatcgctgattacattttaaagaatccacataaaatcattgatatgaccgtgaatgatttggcagatgttacgaatgttagtacagcatcaattgttagatttagtcggaaaatgacacaccaaggttttcaagagctaaagattgcgatatctcgatacttacccgaagatattgcaaccaatccacatttggaattgattgaaaatgaatctgtagaaactttgaaaaataaaatgattgctagagcaacgaatacgatgcgatttgtagctactaatattatggatgcgcaaattgatgcaatttgtgatgtgttgaaaaatgccaggacaatatttttatttggatttggcgcatcgagtttgactattggtgatctttttcaaaagttatctcgtattggcttaaatgtcaggttattacatgaaacgcatttacttgtgtcaacatttgcgacacatgatgatagagattgcatgatttttgtgacgaatcaaggtagtcatagtgaattgcagtcaattgcacaggtggccacacattacagtattcccatcataactatatctagtacagctaataatccagtggctcaaattgcagactatgcattgatttatggcagaactgatgaaaatgaaatgcgtatggcggctacaacgtcactatttgcacagttattcacggtagatatattgtactatcgatttgtagcattaaattatcatgcgattctagattgtataacccaatcgaaaatggcacttgataattacaggaagcatcttgcgacgatagattttaaacattagatattgtgtgcgttctaacataaagttagttgcaacgtaaacaattgaagtttttgatgtgattcagttgcttgatgaaaaattgttgctacaagtttgtaaaactggcatagaggctattttgaaaatgataaaggcgtgacaaattaaagcaaagttcagatttgagctttgcttttttcatagatggaaataaaatgctgttattaaggggggaattaatttggaacttaacgagatgattaattttgtaaaagaaaacaataagataatggttactttatcgctaacaattttcacgtctgtaatatttcctgagttaaaaagttggtattcaaaaatcattaatactgaaaacaaatatagaatattcgatagggcaattattatgattggcacagtgttaccaatgtattttcttttaggatttttgaattataaaatatatattaaactgctagaaagacctcatagtgaatttattaatacaatatggttttcattaataggcataagttatggattaatcttatttatagctatttcaacttacagaaattatttagcgattgttaatagatttcaattatataaaatgtgtgaaaattgtgattacatacattcctataggtttgttgtaaacaaagaaagtacattaattaaagattgttttaaagttggcaataatgacctttacgaacctggatcaaactacaaaataattaacctaaatcaaaccatatatggacactatgaaaaagttgaaagtttttatcaaaataaaaacgacaaaatattccatatcattacgctgaatagaaaaaacttaataagaagttggctttttataaataattggtctattattttatgtcgttttacaatgccgatagtgttcactttatttattttttctttatcctattttgataatggcatttataatgcttttattccaattgtgatatacattttcacttttgtttttcaatcaatcatattcaataaaatatatacagagaacaaacaattgaggacacaatatattcaaaagttgaactctggcatagaagtataaaaatataaagaatagtgtgttggtgtttttagtatacgacttacctcaaacacaaatattaaatgatacagagaataaaattagaataaatttacgtttgaagataaaaaacaaacatttttcattaaagtttatgatatatttagagcaatagaaagtgtatggaaggggatatgaatggcataccaaagtgaatacgcattagaaaatgaaatgatgaatcaacttgaacaattgggttacgaaagagtaacgatacgtgataataagcaattgcttgataattttagaacgattttaaatgagcgtcatgcggacaaattagaaggcaatcccttaacagataaagagtttcaacgtctgttaacgatgattgatgggaaaagtattttcgagagtgcccgtattttacgtgataaattaccacttagacgtgatgatgagtctgagatttatttgtcgtttttagatacgaaaagttggtgtaaaaataagtttcaagtgacgaatcaagtatctgtcgaggatacatataaagcacgttatgatgtaacgatattaatcaacggactaccccttgtccaagttgaattgaaacgtcgaggtattgatattaatgaggcgtttaaccaagtaaaacgttaccgcaaacaaaattacacaggcttattccgctacatacaaatgtttatcattagtaatggtgttgaaacgcgatacttttctaataatgatagcgaactattgaagagtcacatgttttattggagtgataaacagaataaccgaatcaatacattacaatcatttgctgagtcgtttatgagaccttgtcaattagctaagatgatatcgcgctatatgattattaatgaaacagatagaatactgatggcaatgcgcccgtatcaagtgtatgcggtagaagcactaattcaacaagcgactgagacagggaataatggatatgtgtggcatacaactggaagtggtaagacattgacttcttttaaagcgagtcagattttatcacaacaagatgacattaagaaagttatctttttggttgaccgtaaagacttggatagtcaaacagaagaggaatttaataaatttgctaagggtgctgtagacaaaacttttaatacctcgcaactggtacgccaactaaatgataaaagtttgccacttattgtaacgacgattcaaaaaatggctaaagcgattcaagggaatgcccatttattagaacagtataaaacgaataaagttgtatttattattgatgagtgtcatcgcagtcaatttggtgacatgcatcgtctagttaaacaacatttcaaaaatgcccaatactttggattcactggtacgccacgttttccagaaaatagtagtcaagatggtaggacaactgcagatattttcggtagatgcttacatacgtatttaattagagatgccattcatgatggtaatgtacttggtttctcagttgactatattaatacttttaaaaataaagctttaaaagcagaagataacagcatggttgaagcaattgatacggaagaagtatggttagcggataaacgtgtggaattagtaacacgacatatcatcaataatcatgataaatatacacgtaatcgtcaatattcaagtatatttacagtccaaagtattcacgcgcttattaaatattatgagacatttaagcgacttaacaaaaagttggaacaaccattaacggtagctggtatatttacgtttaaacctaatgaagatgatcgtgatggtgaagtgccatatcattcacgtgaaaaattagagataatgattagcgattataataaaaagttcgagacgaatttttcaacagacacaactaatgagtattttaatcatatttcaaaaaacgttaaaaagggcgttaaagatagtaaaattgatatcttaatcgttgttaatatgttcttaactggttttgatagtaaagtactgaacactttatatgttgacaagaatttaatgtatcatgatttaattcaagcgtattcacgtacaaatagggttgaaaaagaatcaaagccatttggtaaaattgtaaactatcgtgacttgaaaaaagagacagacgatgcactgagagtattctcacaaacaaatgatacggatacaattttaatgcgtagttatgaagagtataaaaaagaatttatggacgcttatcgtgagcttaaaatgattgtgccgacaccacatatggttgatgacattcaagatgaagaagagctaaagcgctttgttgaagcttatcgtttattagctaaaataatattacgtttaaaagcatttgacgagtttgagtttacaattgatgaaattggaatggatgaacaagagaatgaagactataaaagtaaatatttagctgtgtacgatcaagtaaaaagagcgacggctgagaaaaataaagtatccattttaaatgatattgatttcgaaatagaaatgatgcgtaatgatacgattaatgtgaattatattatgaatatattgagacaaattgatcttgaagacaaagcggaacaacgtcgtaaccaagaacaaattagacgcattttagatcatgcagatgatccgacattgaggttaaaacgagatctaattagagaattcatcgacaatgttgtaccttctttaaataaggatgatgatatcgatcaagaatatgttaatttcgaaagtattaaaaaagaagcggagttcaaaggatttgctggagagagatctatcgatgaacaagccctaaaaacaatttcaaatgactaccagtatagtggtgttgtaaacccacatcaccttaaaaaaatgattggtgatttgccattgaaagaaaagcgtaaagcaagaaaagccattgaatctttcgtggcagaaacaactgaaaaatacggtgtgtaatgattcagccccctcgctagattagtgtagggggcattattatttcattagaaaaggctcatttgtttggcaatcatcatttggtttcaataaaattttatcatcgtatgtgtatagaaataatgtctataggcatttaaaatagtttataatattaacaggataagtattaaatgtatgttgaaggaggtgcgtagctatggataatagaaatatgattaatcgtgtttttagtcaaaagatattacatcaaattgcaatcaaaaacaaaagtgatgttgttgatgaggcatatgatttttatatacaagggcctaaaaatatcaatgtaatacagaaaatgaagtctttatataactatcttaaaaagtcttatcgtaacgaatatttttacaaaaacacaatgcttaataaactccttctaggacgacattctgttaatacaactactgcactttctgagatgcccatagggaaaagtattgctgattttatattgttaaacggcaaaggtgttgtctatgagattaaaacagaattagataagctggatagattagataatcaaattaatgattattatgaagtgtttaattatgtcgtagtcattacaaatgacaaacacttgaataaagttatggctagatacaaagatacaacagtcggaattttagtattaacatctagaaatacactgagtgaagttcaaaaaccaaaagaaaacaatagtctcttaaactcaaaagcgatgtataactttttacgaaaagaagaaagaaaaagagttattgcacaaaatcatatggatgtgccaacttataatgatttcacagagtatgatgtgttatttgacgtgtttaaagaaataccaatgacgaaactgcataacaacatgatttctgagttgaaaaaaagaggcaacatgaaagaatacaaagatgaatttttagcagctccgactgaaattaagttcttgttatatttcgcaaaaatgacaaagaaagataaaaataaactatatcattttcttaaggatgcaaatgatcccccgcacttcacatagtggcgggggatttattctggcgttaaaatgcccagagtatgggtgtgacccttaaataatggcaaggcacctaaaacttgatatggtgccgagccctaacatagcacaatatagttagtatgacaaagtcatctaacataacacatcagatgttgcccgatttattccagaccatacagtgataaagttgcacaacgcatgacttttatttagcaataactgctacttctgaaataagttgctttgcatagtctgattgcggatgtttgataatatcttctgtgttattaagttcaacgatttcgccatttttcataactgcaactcgatcacatatttcattgataacacccatgtcatgtgtgatgaataaataagtgatgccgaagtctaactgtaattgttttaataactcgatgatatctttttgaattgaaacgtctaaagctgacactgcttcgtcgcaaacaatcactttaggttctacagcaagtgctcttgcgatacttacacgctggcgttgcccaccagataattcgtgtggatagcgatataagaaactttgatctaggccaactttttctaacaacgatacgacagttttaataatgtcgtcattatctttgactttcccgtgaatgataagtggtcgtttaatcacatcaatgactttaaatcttgggttaatagatgcgaatggatcttggaaaatcatttgtatctctcgtcgtaaagctttcaattcatcatctttaaataaacttaatggcaattcgttataccaaataaagccttctgacacttcctttagaccgacgaccgtcttagctaatgtggatttccctgaccctgattcaccgacaatgcctaatgtttcgccttttctaatagccaagttaatatcattaactgctcggtataggctaccacttggtgacttgtaatccacgctcacgcgatcgaattttaataaaatatcattgtttaacggtcttggcggacgcgtttgatgaatatcaggaatcgcatctattaagcgtttcgtataggtatgttgtggcgatttaaaaatactttcaaccgtgccactttcaacgacacttccatctttcattacaatcacatcgtcgcaaaattgatacacagcgcctaaatcgtgagtgataaaaataatagacgtttctgtgtactcataaagggatttcattaactgcagtaattgattttgtgtactggcatctaatgccgttgttggttcatctgcgattaaaatttgtggctttaaaatcaatgccattgctatcatgacacgttgacgcataccaccagaaagttcatgtggataagcatcaaattgtcgagttgcatgttttatacctactttttctaaaatgtctattgtcatcgactttgcttcagatttagatacacgtttatgttgaaatagtacttctgtaatttgtttgccaatcgttaatcttggattcaacgaagagagtggatcttgaaaaatcattgaaatatccttacctcgaatttgttgtaacgctgaagttgataaatttgttaacgattgcccattaaaaataatttctcctgttaacgtgtgatccggataatctggtagtagccctaaaatagatttagcggtaatactttttcctgatcctgattcaccaacaatacctaggatatgtttttttcgtaattcgaaagagacgttttttaccgcttgaactgtagtttcttcataattgaattgtacattcagactgttgacttctaataaatttgacatgatgttgtgcctccctattcacaaatgtgtaaatttattctatacttttgtatatcatagtaatctactcaagattattttacaaggagtgattagcataattacttatttagaatcttttaagtcgttgtatcacaaggcattttacaagtttgtattatcggtattaagcttgccaatatttttatatgcagtgataaagtttttcttttctgctaagagaaaaaatttttacgctaataattctgaaatttcagaaattgaacaggcgttacatcaaaaatataaatatttatcgcagcaaaagtcatccacacaaatacataaagaagcattaaaaatattcaaggcacaaagttctaatacgaattcaaagaatattgaacaagcacatttttcaacatactttgaaaatgtattatttcataagttcatcatgatcaaagtgatattggccttgccgatgttcatcttattgactatttatttacagccactagttagatatatttttgagcgaattgtcatggctgtgattgtcatcattggtgttattgtcagtgtgtttaccattctgtatttttcaccgcttgatgcggcttatagcatactgggacaaaatgcaacaaaggcacagatacatcaattcaatgtattacatcatcttaacgaaccttattttattcaattgtgggataccatcaagggtgtttttacctttgacttaggtacgacttacaaagggaatgaggttgtgactaaagcagttggcgaaagaattccaattacaataattgtcgcagtattagcgctaattgtggcattaattattgcaataccaattggtattatcagtgcgatgaagcgaaatagttggcttgatatcacgttaatgataattgcattaattggtttgtctattccaagtttctggcaagggttattattcattttagcgttctcattgaaattggatattttgccaccatcttatatgccagaacatccaatatcgttgattttacctgtacttgtcattggaacaagtattgctgcttctatcacgcgtatgacaaggtcttctgtacttgaagtaatgcgcagcgattatgttttaactgcttatgcaaagggattatcgacgacaaaagtagttattaaacatattttgaaaaatgccattattccaattgtaacgctagttggtcttctagtggcagagttactaggcggttcagcagtgactgaacaagtatttaacattaatggtatcggtcgttatatcgtccaaaaacaactaatacctgatatcccagcagtcatgggtggggtcgtatatatatcaattgtaatatctttagcaaacttaattattgatatattttatgctttaatcgatccaaaattacgtagtgaaattaacgaaaggaagtgaggcatatggtaaaacttacaacaaagatagcttccttaaaactattcgcaagttatgctattgcaacttatattttagttatattaacgagtgcattaaatctttttaaaggttatgtggctgatacgttctatattgctgaaacattgctaatcgttttaaccatcattttaattatcatcttaacaacggaacaaacatggaagcatcatgacctatggcgacgtatcgtcgaagtgttgttattgttgatgacattaacaggcaacgtatttacattattaatgtttgtaagtattagacgttaccaacgtacatcgcaaatacatagttataacggatgggaatcgtttatacgaaaaactactagacatcgtattgcaattatcgggttacttattttagtctacatgctgacattatcaattgtgtcacaatttacatttgatacgacattggctactaaaaatcagttcaatgcactgttacatggaccgagtttagcctatccgtttggtactgatgatttcggtagagacttatttacacgcgtagttgtcggaacgaaactgacattttcaatttcaattatttcagtagttattgcagttgtttttggtgtgttactaggcactatcgcaggttattttaatcatattgataatttaataatgcgaattttagatgtagtgtttgcaataccatcattattgttagcggtggcaattattgcatcatttggagcaagtattccaaatttaattattgctttaagtatcggtaatataccatcatttgcacggacaatgcgtgccagtgttttagaaattaaacgcatggaatatgtagatgcagcacgtatcactggtgaaaacacttggaatatcatatggcgttatattttgccgaatgcgattgcgcctatgattgtacgtttttcattaaatataggtgtggttgtattaacaacaagtagtttaagtttcctaggacttggtgttgcacctgatgtagctgaatggggcaacattttacgtaccggtagtaactacttggaaacgcacagtaatttagctattgtacctggtatttgtattatgttcgtcgttttagcatttaattttataggtgatgcagtgcgtgatgcactagatccaagaattcattaaaaaggtagggatagatgtgaaaaaaatcattagtatcgcaattatagttttagcgttggtattaagtggttgtggtatccctacgaaatcagaagtggctcaaaagtcatcgaaagttgaagtgaaaggcgagcgaccaacgatacatttcctaggacaggcaagttatgaaaatgatatgaatatcgtcaaagatcaattggaaaatgcaggatttaacgtgaagatgaatatccaaccagattatggtagctaccgtacacaacgtcaagccggcaattatgatatccaaatcgatgactggatgacagtattcggtgacccgaactatgctatgacggcattatttagttctacaggatcaaatagtttattgaaagataaacatgtagaccagttgttaaataaagcttctactcaaaatgaagcagatgttaaacaaacatataagcaaattgaagatgaagttgtatttgataaagggtatatggcgcctttatatggatcaaaaaagaatttagtatatgacaataaagtgttagataaaaatagtgttggattgccaaattcacgtgcattaatatggcaacaatttgattacaacaatagtagagaacgagatacgcggccacttgtgatgacacaacaagatggtgaaattcctacattagatccaatacgttcaattgcgccgtcagtatattcaattaatatgaatatgtacacaaggttattattattagatgaaaatgaccacttaacaacgaaaggttcgttaagtcgtgattatgctgtgaataaggacaataaagcgttttatttcttgttaagagatgatgattattttacgaaagtggtcaatggacaagcacgtaatactggagagcgtgtatcggctgaagatgttaagttttctttagatagagcacgtgataaaaagtctgtgcctaataataatacttacaatatgcacaaacatataaatgacatcaagatattaaaagatgaggacatcgatcagttgcgtaaagagaaagacaaggacgataaatctatctatgataagttgattaaagcgtataacgtcaaatcgttaacgacagatggtcaaaaagtaaataataaagacggtatttatcaaattgttaaaattacgacagatcaatcgatgcctcgagaggtaaattacttaacacactcttcggcaggcattttatctaaaaaatttgttaatcaagtaaatcaagaatatccaaaaggatatggggatagcagtacaattcctgcaaattcagatggaaaaaatgcgctttatgcaagtggcgcatacattatgacacagaaaaatgcatatcaagcaacgtttcaacgtaatccaggattcaacgaaacagaaaaaggtagttatggaccagctaaaattaaaaatattacattgaagtttaatggtgatccgaataatgcattgtcagaacttagaaatcattcaattgatatgttggcagatgtgaatcaaaaacattttgatttaattaagtcggataaaaatttaagcattattcgcaaaaatggacgcaagtcagtctttttaatgctaaatattaaaaaaggtatatttaagacgcatccaaacttgagacaagcagtagttaatgcgatagatcaggatcaatttattaagttttatcgtggcgataaatttaaaattgcatcaccgattacaccacttgtcgatactggtaacgagcaacgtcaagatttagaaaaagtagaaaaagccattaatcaataatgttttaaatatttaacagaaagtaggaggatatagtatggtcattaacttaaatgacaaacagacaaaaacatctaaagaagggttaatttccgtatcacatcctcttgcggctaaaattggtaaggatgtattagatcaaggtggcaacgccatggatgcagtgattgcaattcaactgacattgaatgtggtagaaccatttgcatcaggtattggtggcggcgggtacttgctatattatgagcaaagtactggcagtataactgcgtttgatgcgcgtgagacagcccctgcacatgtagacaaacaattttatctagatgattcaggcgaatataaatcattttttgatatgactacacatggtaaaactgtcgctgtgccagcaattccaaagctgtttgattatattcacaagcattatgctaagttgtcattggaagatttaattaatcctgcaattgaactagctattgaaggtcattctgccaattgggctactgaaaaatattcgcgccagcaacacgcacgattgacaaagtaccacgaaacggcacaagtatttacgcatgaaaatcaatattggcgtgaaggtgattggattatacaacccgaattaggcaagacatttcaaatattaagagaacaagggtttaatgcattttataaaggtgacattgcgaaacaattagttaatgttgtcaaagaatgtggtgggacaatcactttagaggatctagccaattatgacattcagattaaagcgccaatcagtgcgacatttaaagactatgacatttattcaatgggtccatctagttccggtggtatcactgtcattcaaatattgaagttattagaacacatcgatttaccatctatgggtccaagatctgttgattacttacatcatttgatacaggcgatgcatttagcatatagtgatcgtgcgcaatacttggcagatgataattttcatgaactgcctgtacagtcattaattgatgacgattatttaaaagcacgcagtacgctcattgatagcaataaagcaaatattgatatagagcatggtgttgtgtctgattgcattagtcatacagatgttgaagaaaatcataccgaaacaactcatttttgtgtgattgataaggaaggtaatattgcttcatttacgacatcaatcggtatgatttacggatcgggtattacgattccagggtacggcgtgttattgaataccacaatggatggttttgatgttgtggcgggtgggatcaatgaaattgcaccttataaacgaccactaagtaacatggctccaacgattgtgatgcatcacgggaagctaatattaacagtaggtgcacctggtgccataagtatcattgctagtgttgcgcaaacattaatcaatgtattagtgtttggcatggatattcagcaggctatagatgaacctagaatttatagtagccatcctaatcgcattgaatgggagcctcaattttcacaatctacaatattagcattgattgcacgtggacatgcaatggaacataaaccagatgcctatattggagatgtacatgggctacatgttgacttgaatacacgtgacgcatcgggaggtgctgatgatacgagggaaggtacagtgatgggtggtgaggtattatcaattagaaaacaaccattacttagtcccgaaatatacgataatgacacccatcgtgtatatttcaatgatgtgcagttaccattattggcagaacaagtgcgatggatgcatgacaaatattgggttgatgaaagtgtcgttagaatcatcttctctgaagttagtgcacatattgaagatttaagaagttatgaaaacgcaggagaaaattatatagatattgcctgggtagcacgaaagaaaggttatcaagtcacattgaaggatgacggtttatacttaactgatgatacatatacttcagtgaaacggaacacaaatgcatactatagatatgatcgagatagtatcacaagatagtttatgcgcttgatatgaagtttgtagttgataagggtttttgttgaatgaaaggattcgatttggaactttagagtgacgcttgagtgtagtaatgttgcaaatgctatacgaaacgctagtcacctttgtaaaatatacaacgcctcacaaattcgtttttaatgtacatcacaatagttagtctaaaatctaacgtgatgtggtttggtacagttgaacgagttatgtgaggtgtttttataatgtgggattttagaatgttaaatgctaataaatgatttggatatttttatagttacatcataaatattaatgttcacttattttattataagtaaggctttctttataaatgatttggtcttttccaggacttgaaaaataaaaataaagtttctgatcttgatgattattgccttttaaatcactcattccctttaattccacctttgttgatgcgtttttaggaatattatatctacgttttaattgtttaacgtttggattatcgttcgacaacttaccagataaattataataatcagtggtaggatcatgtgttactttcaaatcattgctatttaaaatgcttgttaaatcaccattttgaatcaaaaattgattgttttcgattttttgtttcagcgcgggatcttttacgtcttttgtgaaaacgattttattattaactacttttactggataacttttgtatgtcgagtcagtagcattttttctatcgtttgtagttgtgtcatattcaccagttattttatgtgtgttcttatctacctttaacaacatacggtcttcttttaaaagctcatctgatccaacaactgaataagaggattctatataccatgtgtcttgatcattatttttataatagggattatcgtgaccatcaatttcataaagcgtttctaagtttttaataggatatgtatttagtacttttttaaggccatctttcaaatgaatttgttcccacttcattgccaaaaacataccgccactgactacaattgaaataataataattgctgctaagtttaaccagaaaattttatgtgctttcatacattcacaccgtttcttaaaatacttcattaacactataataatatattttaaaaatatttacatcagtattaaagtgaatatcaaattttaaatttatgaaaataatagatatttataaaaaacgggaaaggtatacaataaaaaacactgtatgacgtttgattagtcacacagtgtagataacaattaaaatgttgttgccaatttttcagcattattaatactagttgctttaatttcttcagttttatgcggttcggcattgtgcccttcaataatgattgtttcatatgatggcacacctaagaatgtcataattgttcttaaataacggtcacccatttcaaaatcagcagcaggtccttcagtataatatccaccacgtgattgaatgtgtaatacttttttgtcagttaataaaccttgtggtccttcagcagaatatttaaaagttttacctgcaattgaaatagcatcaatatatgctttaactacaggtgggaaagaaaggttccacataggtgttacaaatacatatttatctgcacttaaaaattcttctaaaatgtcactcattcttgaaactttcattagttcatcatcagttaacgtttcgccattactcatttttccccaaccagttaatacatctttgtcaataactggaatataagtttcaaataaatcaatatgtttcacttcatcttcaggatgttgttgttgatatgtttcgataaatgctttaccagccgccatagaatttgataccagttcattaaaagggtgtgctgtaatatataatacttttgccatttgaaaattctcctctgtttctgttattttcttaagtataattattatactcgatataaaatttaatatcaatcaaaatattcaaattaccatcattttcttcatctatatttggcggtactactaaagtatgagtgcatttaattatgaaatagttgatttagaatatatacttaatacccaaaatatatgaaggatggatgccactatgacaaagcgaccaaaacgtattttggcaacaattatcatttttctttcactattatttacgattatttatatagatgacatacaaaaatggtttaaccaatataccgataaattgacacaaaatcataaaggacaaggacactcaaaatgggaagacttttttagagggagtcggattactgagacttttggtaaatatcaacattcaccatttgatggtaagcattatggtattgattttgcactgccaaaaggtacaccaattaaagcgccgacgaatggtaaagtaacacgtatctttaataatgaattaggcggaaaggtattacagattgccgaagacaatggagaatatcaccagtggtatctacacttagacaaatataatatcaaagtaggtgatcgagtcaaagcaggtgatattattgcatattcaggcaatacaggtaaacaaacgacaggcgcacatttacattttcaaagaatgaagggtggcgtaggtaatgcatatgcagaagatcctaaaccgtttatcgatcagttacctgatggggaacgtagcctatatgatttgtagttatagaagagtgcccgcagtctaaaaaatcaagcaatcattgtgtgagtataaaacttacataatggttgcttttttcaatgaaaatcgaaatgctaagtcatacttgtttgatttagatattacttaaaaaatgtaagacaaggttgttagcattggcagtgaaatatcgcacgtaaaaaatcattattgtcacactaaaaatagttgtgtgctatatcaattttctgtataaaagtttaattctgacagtaatgtaaacgtttacaatttatgattgacattaataatgagtgactatatgatttatgtaagtatttgtgcaaacgttttcacgaagtgtattgcacaatcaaattgtaaacaaagtatgggaggcataacatggcagaattaaagttagagcatattaaaaagacgtatgataacaacaatactgtagtgaaagattttaatctacatattactgacaaagaattcattgtatttgttggaccatcgggatgtggtaaatcaacaactttacgaatggttgctggactagagtctatcacatctggagatttttatattgatggggaacgcatgaacgatgttgaaccaaagaatagagatattgcgatggtatttcaaaactatgcattatatccacatatgactgtttttgaaaatatagcatttgggctaaagctacgtaaagtgaataaaaaagagattgaacaaaaagttaatgaagcagcagaaatattaggattaactgagtatcttggtcgtaaaccaaaagcgttatctggtggacagcgtcaacgtgttgctttgggcagagctattgttagggatgcgaaagtctttttaatggatgaaccattatcgaatcttgatgcgaagcttcgagtacaaatgcgtacagaaatattgaaattacataagcgacttaatactacgacaatttatgttacacatgatcaaactgaagcattgacgatggctagtcgaattgttgttttgaaagatggcgacattatgcaagtcggcacacctagagaaatatatgatgcccctaattgcatatttgtggcgcaatttatcggctcaccagcaatgaatatgttgaatgctacagttgaaatggacggattgaaggtaggaacacaccattttaaattacataataaaaaatttgaaaagttaaaagctgctggctacttagacaaggaaattattttaggtattcgagctgaagacattcatgaagaaccaatatttattcaaacctctccagagacacaatttgaatctgaagtagttgtatccgaactgttaggttcagaaattatggtacatagcacattccaaggaatggaattgatttctaaattagattcaagaacacaagtgatggcgaatgacaagattacactagcatttgatatgaataagtgtcacttttttgatgaaaaaacaggaaatcgtatcgtctaagggggagtattcatgtctaaaattttaaaatgtatcacgttagccgtggtaatgttattaatcgtaactgcatgtggccctaatcgttcgaaagaagatattgataaagcattgaataaagataattctaaagacaagcctaaccaacttacgatgtgggtggatggcgacaagcaaatggcgttttataaaaaaattacggatcaatatactaaaaaaactggcataaaagtaaagcttgtaaatattggtcaaaatgatcaactagaaaatatttctctagacgctcctgctggaaaaggtccagatatctttttcttagcacatgataatactggaagtgcctatctacaaggcttagctgctgaaatcaaattatcaaaagatgagttgaaaggcttcaataagcaagcacttaaagcgatgaattatgacaataagcaactagcattgccagctatcgttgaaacaaccgcacttttctataataaaaaattagtgaaaaatgcaccgcaaacgttagaagaagttgaagctaatgctgccaaactaactgatagtaaaaagaaacaatacggtatgctatttgatgctaaaaatttctattttaattatccgtttttattcggcaatgatgattatattttcaagaaaaatggcagtgaatatgatattcatcagctaggattaaattcaaaacatgtcgtcaagaatgctgaacgattacaaaaatggtacgacaaagggtatcttcctaaggcagcaacacatgatgtcatgattggtctttttaaagaaggaaaagtaggacaatttgtcactggaccgtggaacattaatgaatatcaagaaacgtttggtaaagatttaggagtaacaacattgcctacagatggtggcaaacctatgaaaccatttcttggtgtacgtggttggtatttatctgaatatagtaaacataagtattgggctaaagatttaatgttgtatatcactagtaaagatacattacaaaaatatacagatgaaatgagcgaaattactggacgtgttgacgtgaaatcatctaatccaaatttaaaagtgtttgaaaagcaagcacgtcatgctgaaccgatgcctaatattcctgaaatgcgacaagtttgggaaccgatgggcaatgcaagcatatttatctcaaatggtaagaatcctaaacaagcgttagatgaggcgacgaatgatataacgcaaaatattaagattcttcatccgtcacaaaatgataagaaaggagattagttatgacgaaacgtaaccctaaattagcggcattattatctgttatacctggtttgggacagttttataataaaagacccattaaaggtacgatattttttatctttttcatcagctttatttctgtattttatagctttttaaatattggtttttggggattgttcacattagggacagtacctaagttagacgattctcgtgtcttacttgcacaaggtattatttctatcttacttgttgctttcgcaatcatgctatatgtcattaatattttagatgcatatcgtaatgctgaacgatttaatcgcaatgaggaaataaaggatccgaaggctcgcatggttgcaacatgggacaagacgttcccatacttactaatctcaccaggtacattcttattgatatttgtagttgtatttccattaatatttatgtttggagtagcatttacaaactacaatttatacaacgcgcctccgagacatacattagaatgggttggtttagataactttaaaacgttattcacgattggcgtttggcgtaaaacatttttcagtgttattacttggacattagtatggacgcttgttgcaacgacacttcaaattgcattagggctgtttttggcaattattgtaaatcaccctgtcgtcaaaggtaagaaatttatccgtactgtgttaatcctaccttgggccgtaccatcatttgtgacaattttaatatttgtagcgttatttaatgatgaatttggtgcgataaataatgatatattgcaacctttattaggtgttgcaccagcatggttaagtgatccattttgggcaaaagtggcattaattggcattcaagtatggcttggtttcccatttgtctttgcactgttcactggtgtactgcaaagtatttcatcagattggtacgaagcagcagatatggatggtgcgtctagttggcaaaagtttagaaacatcacattcccgcatgtcatttacgccacagcgccattgttaattatgcaatatgcaggtaatttcaataattttaatcttatttatctatttaataaaggtggtccaccagtgtcagggcagaatgctggtagtaccgacatcttgatatcttgggtgtataatctgacatttgagtttaacaactttaacatgggtgcagttgtgtcattaattattggatttattgttgctattgtcgcatttattcaattcagacgtacaagtacgtttaaagatgagggaggtttataagatgacaaagaagaaaaacatattaaaagcaatcggcatttacagttttatagcgatgatgtttgtcatcattttatatccactactgtggacatttggcatttcccttaatccaggtacgaacttgtatggtgccaaaatgataccagacaatgcaacatttaaaaattatgcattcttactattcgatgacagtagtcaatacctgacttggtataaaaatacgcttatcgtagcatctgcaaatgcactgtttagcgtgatatttgtcacgttaacagcatatgctttttctagatatcgctttgttggtcgtaaatacgggctgattacatttttgattttacaaatgttccctgtattaatggcaatggtcgcaatctatattttgctaaatacaattggattattagattctttatttggactaacactggtatatattggtggatcaataccgatgaatgcctttttagtgaaaggttacttcgatacgattccaaaagaacttgatgaatctgccaaaattgatggtgcagggcatatgcgtattttcttacaaattatgcttccattagctaagccgattttagcagttgttgctttgttcaattttatggggccatttatggactttatattacctaaaatactattaagaagtcctgaaaaattcacattagcagttggattgttcaactttattaatgataagtatgcaaataatttcacagtgtttgcagcaggggcaattatgattgcagtacctatagcaatcgtattcttgttcttgcaacgctatttagtatcaggtttaacaacaggtgcgacaaaaggttagtttgaaattaggagcggggcagaaatgataaacaaccactaatgaatttattgtgttagtggctcttacaaattagccacagttaatatgtatctaaaaataggaatacatgagtaaaactcatgtataagaaatactaatttctatagaaaaagcatttctttatgttggggccccgccaatataacattgtagagcctagaacgttgattgatgtttaaggctcgacatacgcactaatgacgataaagatttaaaggaggacgttatgatgacgattaaagttggaatcattgggtgtggtggtattgcgaatggcaagcacatgccaagtttacaaaaagttgaaaatgttgaaatgaccgcattttgtgacgtagacatttcgaaagcagcgagtgcggcagaagcatacggtactgacaatgcaaaggtttatgatgattacaaagcattgttaaaagatgacacgattgatgttatccatgtttgtacgccaaatgactcgcattgtgaaattactgtagcagggttgcatgccggtaaacatgtgatgtgtgaaaaaccaatggctaaaacgacagcagaagctcaaaaaatgatagatacagctaaatcaacaggtaaaaaattaacaataggttatcaaaatcgcttcagaccagatagtcaatttttatataaatcagcgcaacgtggcgacttaggtgacatttatttcggaaaggcacatgctattcgtcgtcgagcagtaccaacatggggtgtctttctagacgaagaagctcaaggtggaggaccattaatcgatatcggtacacacgctttagatttaacgttatggatgatggataattatgaaccagaatcagtgatgggttcaacattccataaattaaataagcagcatgatgctgcaaacgcttggggttcatggaatccagatgaatttacagttgaagattctgcgtttggctttattaaaatgaagaatggagcgacgatcattttagaatccgcttgggcgattaattctttagaagtggatgaggcaaaatgttcattatcaggaacgaaagcaggtgctgatatgaaagatggtctacgtattcatggtgaagatatgggcacactttataccaaacacgttgaattggaaaacaaaggcgtcgacttttatgaaggtaatgaagtggatgaagctgaagaagaagcaaaagcttggattgatgcagttgtaaatgatactgaaccagttgtgaaaccggaacaagcaatggtagttacaaaaattcttgaagcgatttatcagtctgcaaaatcaggcaaagcaatttactttgaataacatcatacggtaaggaggcacatcatgacaaaattaaaagttggtgtgataggtgttggtggtattgcacaagaccgtcatattccagcattgctgaaactcaaagacacagtctcgttagttgcagtacaagatattaatacagtgcagatgattgatgttgcgaagcgctttaatatacctcatgcagttgagacacctagtgagctgtttaaacttgttgatgcggtggtcatttgtacacctaataaattccatgctgatctttctatagaagcattgaaccatggtgtccatgtattgtgtgaaaagccaatggcaatgacgacggaagagtgtgatcgcatgattgaagcggctaataaaaatcacaaattattaactgtcgcatatcattatcgccatacggatgtcgcaattactgctaaaaaagcaattgaatcaggtgtggttggtaaacctttagtagcacgtgtacaagcgatgcgtaggcgtaaagtgcctgggtggggtgtttttaccaataaagcgttgcaaggtggcggtagtttaattgattatggttgccacttgttagacttatctttgtggctactaggtaaagatatggtgccgcatgaagtgctagggaaaacatataatcaattgagcaaacaaccgaatcaaattaatgattggggaacatttgatcacactaaatttgatgtcgatgatcatgttactagttatatgacatttgccaatcgagcaagcatgcagtttgaatgttcgtggtctgcaaatataaaggaagataaggtacacgttagtttatcaggcgaagatggcggtatcaatttatttccatttgaaatatatgagccccgctttggaactatttttgaaagcaaagctaatgttgagcataacgaagacattgctggtgagagacaggcgcgtaactttgtcaatgcatgtttagggatagaagagattgtggtgaaaccggaagaagcacgcaatgtaaatgcccttatagaagcgatttatcgtagcgatcttgataacaagagcatacaactttaatgattattatatataatacaaaattctcaatataaaaagaaggagtgctttgcaatgaaaataggtgtattttcagtattattttacgataaaaatttcgaagatatgttagattatgtcgcagaatctggattggatatgattgaagttggaacaggtggtaacccaggagataaattttgtaagttagatgagttgttagaaaatgaagacaagcgacaagcatttatgaagtcaatcacagacagaggcttacaaataagtggtttcagttgtcataacaatccaatttctccagatccgacacaagcgaaagaagccgatgaaacgttacgtaaaaccatccgtttagcaaatctattagacgtgccagttgttaatacattttctggcattgcaggatcagatgataccgctaaaaagcctaattggcctgttacaccatggccaacagcctactctgaaatttatgattatcagtggaatgaaaagttgataccatattggcaagatttagctgagtttgcaaaagagcaagatgtaaaaattgccatagagttgcatgcaggatttttagttcatacaccatatacgatgttgaagttacgtgaggctacaaatgagtatatcggtgctaacttagatcctagtcatttatggtggcaaggtatcgacccaattgctgcgattcgcatattaggccaagcaaatgcaattcatcacttccatgctaaagatacgtacattaatcaagaaaatgtaaatatgtatggtctaactgatatgcaaccatatggtaacgttgcaacaagagcatggacattccgtacagttggttatggacatagtccatatgtatgggcagatatcataagtcaacttattattaatggatatgattatgtattaagtattgaacatgaagatcctattatgtcagtagaagaaggtttccaaaaagcttgtcaaactttgaaatctgttaatatttacgacaagccagcagacatgtggtgggcataatacgaacgcgaggttagtctgaagtttgtctgaagtaagactgatggcagtgtcgaataaatgcatatatcgccaagccattgccaaaaatttcacaccttaaattaagtcattgtttgtaaagaaggtgtactttatataagtatatagcgatggtcatacccattcacagtaacaatcctcaccattgaaaagagtatataaccttttcaatagtgaggtatatgataataaaaaagcctgttgtcacaatggtcatagacacgacatactttaaaggtttctgaatataatatttcaaaacgcactttaaagatggacgtcgatgtcgactaatgtgatgacaggctttcatttttaaatattcattaatttctcttcttgtttaatacgtacatataagaaatacgcatacggtactaataaaatagttgtatatgttgcgtgtgttaataataatacaccgattaattcaggaatgatgtttaagaagtaatttgggtgttttgtaattttatataatccagatttaataataggatggttaggtaaaatgaataattttaatgtccaaataccacctaaagttttaataaccataaataacatgatataagcaaagattaatataactaagccaataccatttgcaaagctaaatgtatctttattaataaatgcctctacaccagccaatacataaattaaaacgtgtgttattgctaaaaacttcgaatttttaacgccatattcaactgcaccgtctgcttttaattgttttgagtgattaatagatatctttaagctgacaagtctgatacagaaaaagataagtaatatagatagaatcatgatgtcctccgtcattatgtcatatgtataagcgttgattttgacaacataaagtattttatagataaaacttgtcaaatactattaactatttattaattttagtacataaatatgtttctaagtatgtgtttatgttcagtattttggataatttaataattttaaggatattaagcgcttacaccgacgtgatatatttggcttaacgaaaatgattgaggtgacagagatgaacttttttgatatccataagattccgaacaaaggcattccattatcggtacaacgtaaattatggcttagaaacttcatgcaagctttcttcgtagtgttctttgtttatatggctatgtatttaattcgaaacaactttaaggcggcacaaccgtttttaaaagaggaaattggattatctacattagaacttggttatatcggattagcatttagtatcacgtacggtttagggaaaacattacttggatattttgtcgatggacgtaacacaaaacgcattatctcattcttacttatcttatctgcgattacagttttaattatgggatttgtgttaagttactttggttctgtaatgggattattaattgtactttggggacttaacggggtgttccaatcagttggtggacctgcaagttattcaacgatttcaagatgggcaccaagaacgaaacgtggtcgatacttaggattctggaatacatcacataatatcggtggtgccattgcaggtggtgtcgcactttggggtgctaatgtattcttccatggaaatgttataggaatgttcattttcccgtcggtgattgcattacttattggtatcgcaacattatttatcggaaaagatgatccagaagaattaggatggaatcgtgctgaagaaatttgggaagagccggttgataaagaaaatattgattctcaaggtatgacaaaatgggagatctttaaaaaatatatcctgggaaatcctgttatatggattctatgtgtttcaaacgtctttgtatacattgtacgaatcggtattgataactgggcaccgttatatgtgtcagagcatttacactttagtaaaggcgatgcagttaatacgatattctactttgaaattggtgctttagttgcaagtttattatggggctacgtatcagacttattaaaaggtcgtcgtgcaattgtagctattggctgtatgtttatgattacatttgttgtcttattctacacaaatgctacaagtgtaatgatggttaacatttcattgtttgcattaggtgcgttaatctttggtccgcaattattaattggtgtatcattgactggttttgttcctaaaaatgccatcagtgtagcaaacggaatgacaggttcattcgcgtatctattcggtgactcaatggcaaaagttggtttggcggctattgctgatccaacacgtaacggtttaaacatctttggatatacattaagtggatggacagatgttttcatcgtcttctatgttgcattattcctaggtatgattctattaggaatcgttgctttctatgaagaaaagaaaattagaagtttaaaaatctaatatcaatcggattaaaagtatcgccaatttgttgcagtatagttggcaatcctgccccgacggcatgtgcgtgaagagatgaaagatactgcttctacccttgcaaatatatcatctctatgtctcggggcagatcataattccctgttatgaagtatccttatttgcccgacttagggtgactcaatgaatttactccttacaataaagacatatagcggtgtcaatattgtagggagtattgtttttatatttaaactctctaaaaagcggactgaaagaaaagtgaaaacttctctagcagtccgctttttcatagaacaaaatgtaggcgccataatcattagttatttgctaatctattttgcttgcttacaataatcacttggcgacatttgtaaatattttttaaaatgatagctaaacattttatactctgaaaagcctactttgtctgcaatttcatagtgtttataatgtcgatctaacaattgcagagattgtaaaatacgatagcgatttaaataatcgacaattgtaataccaacatgatctttaaatgttcgcatcgcatacgattcactaacatcgatatgttgaattaaatctgaaatagtcactttcgtttgataagattgcttaatttgatcaacaatctggtttacataataatcatcgtattctacttttaatagtggttggaaggcatcatgacaaggtgctaagctacggccgttctgtgattgttgctctaataaggtacggacaagtcttcctaaaacaacttctaattgtgcatggtccactggttttaataaataatcaagaacatgatgttgaatgccggctttcatatattcaaagtcatcgtaactcgataatatgatgacattacaatctagatgcgcaatatcattgagtaaatcgacgccatttttacgtggcatacgaatatcagtaattactaattctggctgatgttgttgaattagtgataatgcttcaacaccatctttagcagtgtatattgtattgaaatgatagtctccccaaggaatgatttgctttaaaccttctcgaataattcgctcatcatcacaaataactaccttaaacatctacattcccccttgaaagtggtattttataacaaattaacgtaccttgattacgctttgaaaaaatatggagtcgtgcatgtgaaccatattgaatcattgctttattgtgtaaatgatttaatcccaaatgcttagtatcaaatacatcattattaagagattggcgtacatattgcaggcgagatgacgacatcccaataccattgtcgcaaactaaaacatgtaaattctgacgtgccaatgtcaggcgtatagtaatgtccaatgactcagtatctctaccatgtttaatagcattttctatgagtggctgaagcatcattttaccaattgtctggtgaagcgcttcttcagaactttcgatatggagcttaatcatgtcatcaaaacggatgttttgtatcgcaacatactgttcaatgtagttcaactcttcgtttaattccactgtatgtgagtttgtacgtaatgagtaacgtaacatttgcgataattgttgaaccacagtttgtgctaatttcggagataacgtaattaaatattgtattgtttgcatcgtattgaataggaaatgaggttggaattggcgttctatttcctttaactgaatatcacgcaagcgacgttctgtatgctcaatagaatggatcagttgctcatttgattcaaataaatcgtaaatataattattaatttcttctagttcactgttgttttttaaaggcgtatatgtacctagatgacgatttttggcatagtaaattttttgaataatcgtttcgatatcttttgtttgtcgtttagccatattatctgcactaatgaaaccaaatattactagtaaaacaagaactacagccataacaattaacaacgtgataccatcttcaatgttttcatggatatctttataaataatgagacgatggtcagcatggtttaattttacagattcattcataaatccgaattgttgcggtctatacttttcacctatagtaaaacggtcatcgttggcgtataaaatattgtcatattgatcaacgataagtgcgaattgtcggctatctttcttaatttcacttaaacgtggggtgttagccatataaattttaagcatatatgtactatttttgaatttaagctgatgcgttgaaaataaatacatatttttagtgtttaaatgttcataattattggttataaactgatttggtccagataattcataataaagtgttgcgggctgttggtgtattaattttaataattcacgttttgtagcggtaacatcatgatgatttgttaaatcaagctcttgaaacgaattgttatgctgtgtaataaatgtctgaatctgcttttcagtatgatgtatagatgactgactttcatcaacatgttgatgaatcgtacgatgctcaatccaaatatagatggcatagaagcttactagtccaataataatgactaaaaatactggaaaaatagtagacgcaaataacgatcgtcttaattgatgtctataaggtttgtatgccgtcattgaatcatctccaaaaatttatgatgtggaatgtccggtaatttagatttcggtattaaaggtatgttcttaagattttcgatagactgatcgctttgttcactaacatcctttcgaattgacttggcatcgaactctgcaactaatcgttgttgtactgagcggcttgttaaatattgcactaactttttacgcttaggatgagggtgtgcatttttaactaaagcaataccatcaacatttaacattgttccttcaattggataaacgattgagacaggataacctttgtttttccatgtgcgtgcatcttgttcgtagcttagacctgcgtaatatttaccttttgcaacatcttcaatgactttagacgtctttgacagttgcatcgcgtggtcttggaattgatgcacatcacttactcgatgatgcatgctataaatagcgcgcatatgttgatagcctgtcgttgttgtatttggatttgagtacgcaattttacctttaagtataggttgtaataaatcttgataacctcgaatcttaatatctccttgtaaatctgaattaactactataactgttggcattaatagaaaactagtaacatatttattgttcgagcgataatcctctaattgctgtgttacagatgtatcttgatagggaacaaaatcttctggatgatcaattgtttctgacaacacaccacccataaagacatcaccacgctccgaaaaatcttcgttatgcaagtttgaaagcagtacttgagtagatccgtgtttaatttcaattttgacatgctcttgtttttcaaaatcatttaaaattggacgaatcaagtttgattgatacggagaataaactgttaatacatttttatctgattcagagtgacgcgtattagcgcatgctgataaaaaaatgagaaataatagtaagatataaatttttgatttcatgatatcccatcaattctatgtatattttaatacaataattttagcaataaatgacgcataagtaatgttaaatatttagaaatgtttatagatgacttgttaagacgttgcaaatgttgtgatagcacataatttttgtttgtcaagacgacttaccgaagctgtaaaatcaaactgttatattttatttgtagctgttatataaaaattggcaagatattgaatggttcaaaagtaaatttttacgtcaataaaagtatttaatcctgtctcttcatatataaaagtaaatctttctaagtattgatttaacgcttattaacaatcattttttataaacaaatatatccacctaaattaacttttaaagcaatgaaaatagtgaacattataactgttgtgtaacagaatgcaattagcatattactgttacacaaattagtacagtttctatgttttgacatacatttgatgaaaattgtacataatttatgtgaaaaaaatcacaacaaacatgctacaatgactatgaaaacgttaacatagcatttcaaattcacaacattatacagatggaggcgtttagtatgttagaaacaaataaaaatcatgcaacagcttggcaaggatttaaaaatggaagatggaacagacacgtagatgtaagagagtttatccaattaaactacactctttatgaaggtaatgattcatttttagcaggaccaacagaagcaacttctaaactttgggaacaagtaatgcagttatcgaaagaagaacgtgaacgtggcggcatgtgggatatggacacgaaagtagcttcaacaatcacatctcatgatgctggttatttagacaaagatttagaaacaattgtaggtgtacaaactgaaaaaccattcaaacgttcaatgcaaccattcggtggtattcgtatggcgaaagcagcttgtgaagcttacggttacgaattagacgaagaaactgaaaaaatctttacagattatcgtaaaacacataaccaaggtgtattcgatgcatattctagagaaatgttgaactgccgtaaagcaggtgtaatcactggtttacctgatgcatacggacgtggacgtattatcggtgactatcgtcgtgttgctttatatggtgtagatttcttaatggaagaaaaaatgcacgacttcaacacgatgtctacagaaatgtcagaagatgtaattcgtttacgtgaagaattatcagaacaatatcgtgcattaaaagaattaaaagaacttggacaaaaatatggtttcgatttaagccgtccagcagaaaacttcaaagaagcagttcaatggttatacttagcatatcttgctgcaattaaagaacaaaacggtgcagcaatgagtttaggtcgtacatcaacattcttagatatctatgctgaacgtgaccttaaagcaggtgttattactgaaagcgaagttcaagaaattattgaccacttcatcatgaaattacgtattgttaaatttgctcgtacacctgattacaatgaattattctctggagacccaacttgggtaactgaatctatcggtggtgtaggtattgacggacgtccacttgttacgaaaaactcattccgtttcttacactcattagataacttaggtccagcaccagaaccaaacttaacagtattatggtcagtacgtttacctgacaacttcaaaacatactgtgcaaaaatgagtattaaaacaagttctatccaatatgaaaatgatgacattatgcgtgaaagttatggcgatgactatggtatcgcatgttgtgtatcagcgatgacaattggtaaacaaatgcaattcttcggtgcacgtgcgaacttagctaaaacattactttacgctattaatggtggtaaagatgaaaaatctggtgcacaagttggtccaaacttcgaaggtattaacagcgaagtattagaatatgacgaagtattcaagaaatttgatcaaatgatggattggctagcaggtgtttacattaactcattaaatgttattcactacatgcacgataaatacagctatgaacgtattgaaatggcattacatgatacagaaattgtacgtacaatggcaacaggtatcgctggtttatcagtagcagctgactcattatctgcaattaaatatgcacaagttaaaccaattcgtaacgaagaaggtcttgtagtagactttgaaatcgaaggcgacttccctaaatacggtaacaatgacgaccgtgtagatgatatcgcagttgatttagtagaacgctttatgactaaattacgtagtcataaaacatatcgtgattcagaacatacaatgagtgtattaacaattacttcaaacgttgtatacggtaagaaaactggtaacacaccagacggacgtaaagctggcgaaccatttgcaccaggtgcaaacccaatgcatggccgtgaccaaaaaggtgcattatcttcattaagttctgtagctaagatcccttacgattgctgtaaagatggtatttcaaatacattcagtatcgtaccaaaatcattaggtaaagaaccagaagatcaaaaccgtaacttaactagtatgttagatggttacgcaatgcaatgtggtcaccacttaaatattaacgtatttaaccgtgaaacattaatagatgcaatggaacatccagaagaatatccacagttaacaatccgtgtatctggttacgctgttaacttcattaaattaacacgtgaacaacaattagatgtaatttctcgtacattccatgaaagtatgtaacaaaatttaaggtgggagcactatgcttaagggacacttacattctgtcgaaagtttaggtactgtcgatggaccgggattaagatatatattattcacacaaggatgcttacttagatgcttgtattgccacaatccagatacttggaaaattagtgagccatcaagagaagtcacagttgatgaaatggtgaatgaaatattaccatacaaaccatactttgatgcatcgggtggcggtgtaacagtcagtggtggcgaaccattgttacaaatgccattcttagaaaaattatttgcagaattaaaagaaaatggtgtgcacacttgcttagacacatcggctggatgtgctaatgatacaaaagcatttcaaaggcattttgaagaattacaaaaacatacagacttgatattattagatataaaacatattgataatgacaaacatattagattgacaggaaagcctaatacacacatccttaacttcgcgcgcaaactgtcagatatgaaacaacctgtatggattcgccatgtccttgtgcctggttattctgatgataaagacgatttaattaaactaggggaatttattaattctcttgataacgtcgaaaagtttgaaattctgccatatcatcagttaggtgttcataagtggaaaacattgggcattgcatatgaattagaagatgtcgaagcgcccgatgatgaagctgttaaagcagcctaccgttatgttaacttcaaagggaaaattcccgttgaattataaatacaattcagaccgaaaagaaagcatatgcaacttcaagagtgaaggggcatatgcttctttttcaattgagtattgagtattagcaaggcgtagttagtatatgagacaagtccaacaatggttgaaggtagacgtttttgcaagtagctatgctgataaagaatgtgatgccttgttaaaggtggggttccaatatcatcgaatgggttattaattgctacttgcatatgaatatgagtcttttcaaatttttattgaccctgagtaatgaaaaatattaagatgaaacttaatattaaagcaatgcggagcgtgattatgaagagaattagtaaagatatatgggcagtatttaaattactgtatcaaaataaagggcgttttagcattaatgccttactattgcaattaatcatgatttttattagtagtacatacttaattttactatttaatatgatgttaaaagtagctgggcaaagccaacttacgattaacgattggatggaaatcgtaagtcaccctgccagtgtgatacttcttattatattcatattaagtgttgcctttctgatttatgtagagttttcattgttagtttatatggtttatgccggctttgatcgacagattattacatttaaatccatttttaaaaatgcctttgtcaatgtgcgtaaactcataggtgtaccagttgttttctttgtcatttatttaatgttaatgatacccattgccaacctaggactaagttcagtattaacaaaaaatatttacatacctaaatttttaacggaagaacttatgaaaacgacgaaaggtataatcatttacggtacctttatgattgctgtatttatattaaactttaaattaatatttaccttaccgttaacgattttaaaccgccagtcgttatttaaaaatatgagactaagttggcaaattacgaagcgaaataagtttcgacttgttatagaaatagttatattggaactcatcattggtgcgattttaacattaattatttcaggagcaacatatcttgctatttgtgtagatgaagaaggagataagtttttagtctcctcaattttatttgttgtattgaaaagctcattgttcttttattatttatttacgaaattatcattaatcagtgtgttagtactgcacttaaaacaagagaatgtattagaccaaccgggcttagaatttaaatacccaaaaccgaaacggaagtctaggttctttataatttcaatggtgcttgcagtgacatgttttgtcggttataacatgtacttactttacaataatactatcaatacaaacatctccattattggccatcgtggtttcgaagataaaggcgttgaaaattcgattccgtcattgaaagctgctgcaaaagcgaatgtcgaatacgttgagttagatacaattatgacgaaagataaacaatttgttgttagtcatgataacaatttgaaacgtttaacaggtgttaataaaaatatttctgaatctaatttcaaagatatcgtcggtttgaaaatgcgtcaaaatcgacatgaagcaaaacttgtatccttagacgaatttattgaaacggctaaacaatcaaatgtgaagctactagtagagttaaagccacatggtaaagaaccagcagattatacacaacgtgttattgatattttgaaaaagcatggtgttgaacatcaatatcgtgtgatgtcattggattatgatgtgatgactaagttgaaaaaagaagcgccatatctcaagtgtggttatatcattccgttacagtttggtcattttaaagaaacaacattagatttctttgtcatcgaagatttttcttattcgccaagacttgttaatcaagcacacttggaaaataaagaagtctatacttggaccattaacggcgaagaagatttaacgaaatacttacaaaccaacgttgatggtattatcacagatgacccagcattagctgatcagattaaagaagaaaagaaagacgaaacatacttcgatcgttctataagaattttatttgaataatataaataaagacctctaaagttatcaagatgataccttcagaggtctttttaacgttgccatcaatgggataggcaatcgttttattcgtttataatcatatgacaaggatttataggataatgtggggtccaaaacacatatatgatttattggtaagttgctaattgttttgtgaatgcaaagggttagaaattgaatcgtaaatactttctaatctatgtttcgctttagtcatttgatccaaatttttagtgcgtatagcggattttgcaatatagtgcgcagctaaaatatcgcgtttttgatacgcatctaaatttaggtacgataatttatttaagtcagtgtttgctattaattcatgtaattgatctacaagcgcttgatgttgatacgtatgtgatgtagtttcagatttgcttgctaatttaataccagtcgtatcaaggagcgccgctttaataccagcaactaaatatgttttgattttcatttgtgttgtcatgctttgttactcctttgatgtacattaatcaaaaaaattatacactattgtatattgcaaagctaattaactataacaaaaagatagttaatgctttgtttattctagttaatatatagttaatgtcttttaatattttgtttctttaatgtagattgggcaattacattttggaggaattaaaaaattatgaaaaagcaaataatttcgctaggcgcattagcagttgcatctagcttatttacatgggataacaaagcagatgcgatagtaacaaaggattatagtgggaaatcacaagttaatgctgggagtaaaaatgggaaacaaattgcagatggatattattggggaataattgaaaatctagagaaccagttttacaatatttttcatttattggatcagcataaatatgcagaaaaagaatataaagatgcagtagataaattaaaaactagagttttagaggaagaccaatacctgctagaaagaaaaaaagaaaaatacgaaatttataaagaactatataaaaaatacaaaaaagagaatcctaatactcaggttaaaatgaaagcatttgataaatacgatcttggcgatttaactatggaagaatacaatgacttatcaaaattattaacaaaagcattggataattttaagttagaagtaaagaaaattgaatcagagaatccagatttaagaccatattctgaaagtgaagagagaacagcatatggtaaaatagattcacttgttgatcaagcatatagtgtatattttgcctacgttacagatgctcaacataaaacagaagcattaaatcttagggcaaaaatagatttgattttaggtgatgaaaaagatccaattagagtgacgaatcaacgtactgaaaaagaaatgattaaagatttagaatctattattgatgatttcttcattgaaacaaagttgaatagacctcaacacattactagatatgatggaactaaacatgattaccataaacataaagatggatttgatgctctagttaaagaaacaagagaagcggtttctaaggctgacgaatcttggaaaactaaaactgtcaaaaaatacggggaaactgaaacaaaatatcctgttgtaaaagaagagaagaaagttgaagaacctcaatcacctaaagtttctgaaaaagtggatgttcaggaaacggttggtacaactgaagaagcaccattaccaattgcgcaaccactagttaaattaccacaaattgggactcaaggcgaaattgtaaaaggtcccgactatccaactatggaaaataaaacgttacaaggtgtaattgttcaaggtccagatttcccaacaatggaacaaaacagaccatctttaagtgacaattatacacaaccatctgtgactttaccgtcaattacaggtgaaagtacaccaacgaaccctattttaaaaggtattgaaggaaactcatctaaacttgaaataaaaccacaaggtactgaatcaacgttgaaaggtattcaaggagaatcaagtgatattgaagttaaacctcaagcaactgaaacaacagaagcatcacattatccagcgagaccgcaatttaacaaaacacctaaatatgttaaatatagagatgctggtacaggtatccgtgaatacaacgatggaacatttggatatgaagcgagaccaagattcaataagccatcagaaacaaatgcatataacgtaacaacacatgcaaacgggcaagtatcatacggagctcgtccgacatacaagaaaccaagcgaaacgaacgcatataacgtaacaacacatgcaaacggccaagtatcatatggcgctcgcccaacacaaaacaagccaagtaaaacaaatgcatataacgtaacaacacatgcaaatggtcaagtgtcatacggtgctcgtccgacatacaagaagccaagcgaaacaaatgcatacaatgtaacaacacatgcagatggtactgcgacatatggtcctagagtaacaaaataagtttataactctatccacagacatacagtcaatacaaaacattacgtatctttacaacagtaatcatgcattctatgatgcttctaactgaattaaagcatcgaacaatcggaagcatatttctaaattatttattcattatagtcttaaacataacatgacctaatatattactaacctattaaaataaaccacgcacatctatgtgacatacgacaatcacagcaataataattgctttagaaagtcgtaccgaactggaacttacaagtctagttcgaacacacactgatgtgagtggttttctttattttaaacatgaacaatcagataagttactagcattagcaaatattattaaatcaaagggcttcgattcataaaatttaaaacaatgattaaaattagacgtgtaaatgttaaattctaaaacggaaatacccgctatcctattaaaccacttttttgttcaatcactatatttcacacagcttcaataataaaatgaaactgcttcaatccgcttcaacttcagtctacttcatttaataacaaaacgaatccgcttcatccaaaatcaaccattctaacgcacatactcaaatatagcagctgcacccataccgacaccaatacacatcgtaaccatgccgtaacggctatcgggacgtctacccatttcattaagtaaacgcgcggttaacattgcgcctgtagcacctaatggatgacctaaagcaatagcgccaccattcacattcgtacgtgatatatctagacctacttctttaatagatgcaatcgtttgagaagcaaatgcttcgttcaattcgatcaaatcaatgtcttcaacagatagattgctgagtgacaatacttcaggaatcgcatatgcaggcccaatacccataattttcgggtcaacgcctactgccttataaccaacgaatcgtgcaataggtgtcacgccgagttctttcactttatctccagacattaaaactacaaatcctgcgccatcagaaagtggggcagatgttcccgcagtcacagtgccgtcagctttaaatactgtacgtaacttggctaatgcctctatcgtggtgtcaggtcgtataaattcatcttggtcaaagatatttgtgtgtacttttggtcctgcatttgtatattcaactgagtttacttgtattggaataatttcatctttgaaccgaccatcaagttgtgcgtcataggcacgttgatgacttctgacagcataagcatcttgatcttcgcgtgatacgtcaaattgggatgctacattttcagcagttaaacccataggatatgacgcacctatatcatcatattgtaaggtaggattgtttgtgggctcgttgccacccattggtacggcactcatcaattcaacgccaccagctacaagtatatctccttgaccagccataatttgattggctgcaatcgcgatggtttgtaatcctgatgagcagtagcgattcactgtttgacccggtaccgtgtcagataatcccgtacgcaatgcaatcgttcgtgcaatgttttgtccttgtaatccttctggaaaagccgtaccaacaatgacatcttcaatcatattcttattgaattttccgtcaatacgtttcaatacgccttgtaatactttggctgcgacatcatcaggtctttcgtggaataatgcgccttgctttgctttcgctgcggctgaacgcccataagctacaatgtatgcttcttgcatggttatcatcctctcttaatgactatcttttaattacgtaatggcttaccagtttttaacatatgtgcaattctttcatatgattttttagattttagtaagtcaataaagccaattttctccaacgattgaatgtaacgttgattgataaatgtatttcttggtaaatcaccacctgctaaaattgtggcgatatttaaggcgatatgataatcatggtcgctaataaaatgaccgtgtctttgcgcatctaattgtccttggatcaatgctttgaagtcttcgcctaaagcgatatattgatgtctaggattcggaatatagtttgtttctgcttcatatttcgcacgtttgagcgcaacttcgacacgttgtgctgtattgaaaataatcgtatctgtatcacgtaaataaccataacgacgtgcctcaaaggcatttgtagagactttcgcaaatgcgatattcgtcagtacttttgtcatggaagcttgtttgtcatcaaacttatgcgatgtgcgtaatatgcgatcagccatttctgcaaggccaccgccactcggtaataagccaacacctgcttcaacaagaccgatataagtttcacttgcagcgacaacaataggtgagtaaagtacaagctcacagccaccgcctaaggcacgaccttgaacagctgtgactactggtttcaaactatacttcaaacgattaaagctataatgtaatttatcaattgattgtgcaacgacatcatctacaagaccatcttcatgcgcctttttcattaagaaaaggttagcacccacactgaaattattaccatctgcataaataaccatacttgtgtaatgttcattttccagtaaatcaatcgcatcaactaacgcatcgttgaattcatcggtaatgacattatttttactttgtaatttcagtaacagttgatcatcatgagttacggaaagtttggcatcacctttatcccaaagttcatcttttacgaagtgagaaataggcgttgcatattcaatggtctcatcttgtttataaaagccaccgtctaaatcactaatccattgtggtaagtctccaagttcgtcttccatacgtgttttaacacgttcgtatcccattgcatcccataattggaatggaccaagtttccagttgaacccccagacaagcgcacggtctatgtctcggaaatcatcggtagctttaggtacattgatagcagagtaatagaaattattacgtaatgtctcccataaaaatagtcccgcttcgtcttgcgcattgaatatgacatcaaggttatgcactaagtctttattaaattcatttaaaattggtaattgtggttgcgatacaggtacataatcttgtttttcaacatcgtaaacaagtcgagctttagtttctttatcctttttgtaaaatccttgttttgttttacgtccgagtgcgccattttcatacaacgtatttacaattttgacatcatgaaaataaggtgtttcttcaggtacttgttgcatgcctttaattacagacactgcaatatctaaaccgactaggtcagatagggcatatgtacctgttttaggacgaccaatcgcttgcccagttaaagcatctacatctacaatgcttaacttgtgttgctcggcgcgatacataatatcattcattgtttgcgtgccgactctatttgcgacaaagccaggcacatcattgacgacaatgacacctttacctaacacattttgcgcgaaattttttacatctaatataatagattccttcgtgtgtgacgtaggtattaactccactaatttcataatacgtggtgggttaaagaaatgtagaccaaagaatcgttcttgatccttcttgttaaatgctttagcaatcgcattaattggaatacctgatgtatttgtggcgaataaagcatcttctttagcatgttgtagaacttgttgccaaacagcatgcttaattttgatatcttctttgactgcttcgatatataaatcagcatcatcatttaccaagtcatcatcaaaattaccatatgttaaatgactcgctagatttaagtcgaatagaagcggccgtttcttatctgtaattttatcgtaagattttttcgcaatgagatttggatcgtttttgtccactacaatatctaatagttttactttaagtccagcattcacaaagagtgctgccagttgagcgcccattgtgcctgcgccaagaacggttactttattaattgtcatagtgattcctccaatttagttgaggataagataaccattaagataattggaataacgttgctattttataaaattaattaagtatctttgacagtcatcttagcctcttatttaaggaaaaagctttatgcttaaaataagtcttttttagtgaaattactgcatcacatataattctttgctatttatacgaaagcagaatctccagtcaaagcgcgtccaattactaaggcattaatttcatgtgtgccttcgtatgtgtaaatcgcttctgcatcagagaagaaacgtgcaatatcataatcgtcagctagtatgccattaccacctgtaataccacggcccatagctactgtctcacgcaaacgtaaggcattcatcatcttcgccgttgaagttgcaacctcgtcatattcaccatgtgcttgcatattagctaattgagcacatgttgccattgcttgagctaaattaccttgcatcattgctagcttttcttgtattaactgatatttactaattggtttgccgaattgcttacgctcagtgacataatctaatgtggcacgtaaagcgccagccataccacctgtagccatataagcaacgcctgctcttgttgaataaagaattttggcaatatctttaaagcttgttatgttttgtaagcgatccgcttcatctactttgacattagttaatttaattagtgcgttaggaacaatgcgaagtgcgattttattatcaatgacttcaatatcgacgccatcttgttctggtctgactacaaagcaatggggtttgccagtttctttatttactgcgaatactggaatgacatcagatacatgtgcaccaccaatccatttcttttcaccattgataacccaagtatcgccctggcgttcagcgactgtttcaagacctcccgcaacgtccgaaccgtgttctggttcagttaaagcaaagcatgtacgcagttcatgtgactgtaatttaggtacatatttcgcaatttgttctttgctacctccgaaatagaaagtgttatgccctaaaccttgatgaacaccgagtagggtagctaaggaaatatcaaatcgcgcgagtaggtaagacatgaaaaactgaaatagttgactaggcattttggcgtttggacgatccttgtatagtaatggattgttaaaataatttaattctcccagatctttaaaataatcctcgggtacagtagcgtctatccaatgttgattaatattttcacggtacttactttctagcaatgaatctacttgttgtaaaaattcgacttcaccgtctgttaaacctttagcaatactaagtacatcttcaggaaataatgtttttaagactgtttctttttcaaatgtcatataaattcctcctaaaaataatatgaatactaatgtgaaatgcatttaattcaaaaacaacacgattcgcttgtaaacgcttacacaaaatatcaaaaatttttaccacatttaaagtgtttgcgagactttgtcattcatcatttgtcgaatcgcaagtttatctggtttctgcgtactgtttaacggcatatgtgtcactggtacatacattcttgggactttataacctgctaaacgacttcgcatatgttgatctaaaattttatcgtaatgaggttcatcttcgcgaagtataatggctgcagcaattgactcaccatattttggatgatcatagccaacgaccacacaccggtctactagtggatgctccgctaaagcattttcgacttcggatggtaagacattttcgccaccagttatgattaattcttttttgcggtcaataataaatatatcgccatcgtcgtccatcttcgctaaatctcctgtcaataagtaacgaccatgaaacgctttagcagtctctgctggtttattccaatatcctggcgtgacatttttagccttaattgcaagttcaccaatctcaccagtaggtacttcttcaccgttatcatcaaggatacgtgcatcaacaaacatgactgctttaccaatactcattggtttacgttttgaattttctggtgtattaacaagtacaagaggtgcttcagttaagccatagccgttaataatgtttatgccatattgtttaaacgctgcttggatacttggtaatggttgtgaaccaccttggatgatataatccatagctttaaaattttcaggattaaaattactggcacgtagcgtactataatacattgtcggaatcatgataataaatgtagggtgatattgtgcaatcatgtcattcaattcttcgccgttaaagtaacgttgaagaataagtgtgccacctgacattaatactggtaatacagtatcgttaaaccctaaaacatggaacattggtgttgatacaatcgtaatatagtttgaattgaacttgtacgtcagctctaagtttgcgccgttatgaacaaatgattcatatgagaacatcacacctttaggtgatccggttgtaccacttgtataaattaatgctgcaagatcttgtggttcaacaggtgttgcttgaaaaggttggtgataatctggatttacgatttcatcatattgcgctacatcaatatccatatgcaataagttttggtcaatatcggtgagtgaacttaaatgtttttcagcatagaagagcagttttaattgtgcatcttccacaatggctgcaatttcttttgggttaagccgccaattcaatggtaaaaaaaccgcacctgttttaaaacaagcaaataataaatctaatattgcaatatcatttggcgcaaaaataccgataacatcgccttttttaacaccttgagatgttaaataatgtgccatattatcagcgcgtgcattgagttgttggtatgtccaagatgtttgttttgcgtgatcaataacggcaggcttgtcatcatcgaagtctgagcgcgtttttatccaatcgaaattcattagtataccccctttagcttcactttcatactttatgaattgattgtttaagttctccccatttttctttgtaaatgctggtatcaattaattttaaatgatcagcaataattggtttaaaagccatttgattcaaaatatctttatgcaaatcaagacctggtgcaatttcaattagtttcaagccttgattggtgagctcgaatactgcacgatcagtaacaaaatagacttcttgctcgagtgattgtgaatattgtgcattaaagtcgatatggctcacatctgatacaaatttctggttttgtccttcagtttcaatgtttaatcgttgattatgacatgagacatgactgccagctacaaaagtacctgaaaagataattttatttacagattgtgtaatgtctataaagccgccacatccatttagtcggtcattgaagtaagacacgttgacattgccgtattgatcaacctcagcaaagctaagataggcaactgatacaccattgttataaataaaatcccatgctcgatcatgaggcatgcgcacatctgcattgtaattcataccaaaatgttcacgactcccaacgaatccaccgaaaatgccaacatctagaatcggttgcacatcatgttcaacacattcttcatgcaataaattagagagttcattattgatgccataaccgatgctaattgtatcgccataagttaaaaactgagcagcacgtcggagaatcaacttgcgactattaaaaggtaatgcgggttcaggtattccatcaatccgttcttctccagacaaggctggtaaataatgactctgaattacttggcggtgattcttttcatcttctgtgacgtatacataatcgacaagatttcctgggataacaacttcattcggatttagttgatattcatcaactaaatctttaacttgtacaataactttcccatgattggctttcgcgtttaatgcgacatgataacactcgctcaagtacgattcttgagttaaataaatgttaccttgttgatctgcgtatgttcctctcagtagtgccacatcaacgctagggaatgtgtagtgtaagtatgtttcatcgtcgatagttactaatgaaactaaatcatcagttgttcgtgtatttactttaccgccaccgtatctaggatcaacagctgtgtttaatccgattttagtaataactcccggtaataattgattactctgacgataatgagttgcaatgataccttgtggtaaaaaataagcttcaatgtcattatttttcattgcttgtgccgttttggaagaagccgttaaaatgctcataatgacacgtttaatcatgcgacgttctataaaatcatctaaatccggtgcgacacctaaactatggatatcattcgctaatataaatgttaaatcattgggcgtatgatatgtgtcatgttgcgctaacacagcacgtagaacctcggcgggtaagttggctacagctaatgctggtaaaccaatcacatcaccatctttaatgatatgttgtaagtcgtgccatgtgatttgtttcaagcaagtcacctccatcacatttgataaattatagcgtttttacactttgtgtaaacccttacaagaaatataacataacgacgtttaaaatcaattagaaatatctttttattctgataatagacacagtatagacacattttaatgatcgataacaattgtaatatcaagggtttgtaatgaattgaatatcattaaaatacttatataaaaatattgctcggaatataaaaagtaacccatgtttatttaaagaatgcaaagactaattatcattttgatgcatcagtaaggcgagggtgatcagcgtacaattagtggtgtataatgtaactgataaaatcattggagagttgaaggagatgttgaacatatgagagtcaatgttttacaacatacaccaaatgaaggtgttggatacataggtgagtgggcgaaggaaagagggcacgaagtctatatttatcatccatatatgaatgatggcgtgctacctcttgcggaagaaacggatatgttagtgatacttggtgggccaatgaatccagacgatgagatgccttggattcaatcagagcgccaattaattttagtattgatggcacaaaacaaaccaatttatggtgcttgctttggtgcacaacaaatttcgaaagcattaggttatgcggtgttaaaatcaccagtaaaggaagtaggttgggatgatgtttacttagaatcagaaatcattccgaatataccaagtcgattgaaggcactacattggcatgaggatatgtttcaaataccgcaacaagcagaattattattttcagggaaccatattaggaaccaaggatttatcatcgatcatcatgtgattggattacaatttcattttgagcctggtccagacgatgtcagagaaatagtactaaatgatgcccaatacatcaatcattctattttagagcaatcggcggaggatatattagcctttgaggtgcctaaacagaataggcaggccattttccgaatacttgattttattactcaagcgtaagatgtgagttgtattttaaaatgagtaaaaaaaaaacgaatgtacacaatcgaacaaagtagttatataaatatatggaaaatccatcaatattaaattaaaatagttttattatgaaaagtgaaagtaggtaagtctatggaaggtcttaatcatcgaagaaatacagaaaacgaagagacaacacaaacgcaatcagttgcacctaatacaggtgaagaggggatgtcatcagcaagtacacaatcaactaagacgtccgacatacataatgaatctatcgataaacaaatggaagccaaagcgcatgaaacagcgcaaaatacagatttaaaaaatgaagcaagaagtttatttgataatgcaaccaaatcaatcggtagactagcgggcaatgatgaaagcttaaatcttaatttaaaagatatgttttctgaagtatttaagccacatactaaaaacgaagcagatgaaatatttatagcgggtactgctaaaactacgccagcaatttgtgacatatcagaagaatgggggaagccatggctcttttctcgagtattcatcgctttcacagtaacatttattggattatgggtcatggcagcgatttttaataacacaaacgcgattccgggtctcatttttataggggctttaacagtaccattatcgggtttgttcttcttttatgaatcaaatgcgtttaaaaatattagcatttttgaagttattatcatgttctttattggcggcgtattttcattactaagtacgatggtattatatagatttgtcgtttttagtgatcaattcgaaaggtttgcttctttaacatttttcgatgcatttttagtaggattagttgaagaaactggaaaggcgcttattattgtttatttcgttaataaattgaaaacaaataagattttgaatggattattaatcggtgctgctattggtgcagggttcgcagtttttgaatcagcaggttatattttgaatttcgctttaggggaaaatgtcccattattagatattgtcttcacacgtgcgtggactgcgattggtggtcatttagtttggtcagcgattgttggtgctgcaatagttattgtgaaagaacagcatggctttgaattcaaagatatttttgataaacgctttttaatattctttttatcagccgttggtttacatggcatttgggatacatctttaactatacttggcagtgatacgttgaaaatatttattttaatcgttattgtgtggatacttgtattcattttaatgggggcaggtttaaaacaagtgaatttactgcagaaagaatttaaagaacaacagaaaaaagtagacgaataataattaaagcttatgttgctatgttttttagcgacataagcttttttataatttgtctttaaaagagtggaagtggaatacttttttggagttaaaaaagtgtttcacgttaaacaaatagtgacaattaggtttatataaaatgaatatgattcactgaaagtatgtaataatcattttattgaaattcatcaaacagaaagtaatacaatcatataagcaaattaaaccacgccataatcatattggatgacttcggcgtggtttttatagttgaagcagggctgagacataaatcaatgtcttacactcccttatcgttcaatcgtagttcgataatcgattaaatagataccttcaggtgttactttataatttttaaccttagagttagcagcgactatttgatcgttgtaagcaatataactgttaggtacatctcgacttgataatttaataatatcattagaaatattgtgacgttccttaacatctacagtatgattcaattgattaattaaatcatcaacgttgttattattgtagtctcctttattaatagcaccatcttttttatatgcttgattaaagaaatagcctgtatctccacgaggaatcgttccgaaactatacattgttgcatcccatgcagaacggtcttttaagtaactttctatgtcatcaacacttttaatgtcgatttcaatatgtgcttttttagcatctgattgtaatacttgcgcaattttcgatagctctggacgaccgtcatacgtaattaacttaatttttaaagggtgttcttttgtataaccatctttagctaataacgtttttgcttgttcgatattttgtttggttaacttaggttctttaatatatggaattttatcattaaatggactcgttgctggtttcgcgtaaccttgataaatatgatctgcaataccttgtctatcaatgatatgatctaatgcttcacgaacggatttagtcatttttttattagtatgattatacataagtaaagaagttctaaatcctgattcttttgacacttttaaattttgattgttttctatgtcttgaactttattaactgggacatcagttattaaatcatctttttgagattctaaatttctgacgcgattattgccgtcttcttggtacgtcacagtaatatgatcaagtttcggtttaccttgccaatagtccttaaaattcgacaatgatatttttcgagattgcttataatcttttatttggtaagggcctgtaccaacaggagtttgattaacatctgatttagcatctgtatcataaattgccataaaaggattagccaattcagatacaagttcagggtaagcggagctggttttaattgtcagtttttgaccttttgcggtaattgatgatattggtaatgaatatttgaccaagtcgctttttttcatgctattttcaaggctagatttcactttttctgcagtcaatttttgaccgttttgaaatttaatattatcttttaattctatatctaacgttgtatcatttggttgatgatacgatttcactaatactttttctatttttccttgatcatttgttttaaataatgattctgcagcaccgatcttaactggtacatctgtttcataaggtgcaatagactttgtttttaacggtaacgaaatatttaagtctttgccagatgaatgcattgagccacatcctgataacactaatactgctgaaaatatagttgctagtcttttaaacttcatttcattaacactctctttctaattactatgtaaaacccaataattaatattttaaaactttattttgttaaagtaaaatgttgttcaagtttagtaattattaaagttcaattaattgtagtaattatgctttttaaaaataaatattagaaatgaagttagcgacatgtatagtgattcgcgataagcatatatacctaagtattgagcaactgctgcagtaccacagcttgattatgttctgtatcttttgcggcatataacaatagaacatgattatgctgatttacaatatcctttaatttttcaaaagcttctttttgcgtctcattgtcacgcaattctttttcgtatttttctttaaaagcaccataaagtttaggatcatgttggaaccattgtcgtaactcagtagaaggggcaatgtcttttaaccaataatctaggttagcagttcttttcgaaatacctcttggccagactctatcgactaggatacgaatagcgtcggtattatctttattgtcataaatccgtccaatatctacggtcatcttgtgaactcctttcttatgaaattcagtgagcatacatcaatgcatgttggggtgggacgacgaaataaattttgcgaaaatatcattacagtcccactcccaattaaaaaacaaccatgacaaagtaaagtcatagctgtttttgtatatatgttatttatttttacgcttggttaaatacttcaaaccaactgcaaagacggtgtaaccggcaagtgtttgaatcaatgttttgattaaattgttatttttgacaacaatatttgcggtaacaatactcgcgaaatataatgcaaatacttttacgtaacgttgattaagtttcatatgagcactaacctcttttctcagttatactgcaacgcttaatcttggaataaatgtttcgtagtgtacgcgatccatatcgtaatttaaagatttaagtgcttcgatcatagattgtaagaattttgtaccaccacagatataaatttcaggtttatttgctaaaaatgcttttaattcttcagcaccgatataaccttgttcaccttttaagtgggtatataatttagcgttgtcataatgatttgcgatactgttgaagttgtctttgaaaggtaaatgttgttcattttcagcaacttgaaccatctgtgtatctaaacctttggcagaggcatcttcatacattgctactaaaggtgtgacgccaatacctgaacctaagaaaagttgtggttcagtcgtattctctaatacgaatccacctacaggcgcagctaaattaatcatatcgccttctttaatctcatcgtgtaaaattgttgaaacttcgccttcatgttctgttgtgacatcacgtttaacgccaaaagttaaatgatttttatcacctgatacgatagaatagtgacgtttagctctatatggaagtttatcactagaaacatcaactgtgatgtattggcctggtacatattgactaaagtcatatgcatcagtttcaactgtaaatgatttaatgtcttcagattcttgtttaatattggtaattttgaatggtttaaaaccaatccacatcatttgatcataaatttctttttcaatttggatgaacacatccgcaataacgccatatgctttcgcccaagcttgaatgacagggtcattttcttctaatcctgtcacgtcttgaatggcttttaataaattttcccccacaattggataatgttcagcataaacttgtagtgcgcagtgtttatatgcaactggcataataactggtttaataacacttaaattatcgatattaaccgctgcggccattactgcttgtgctaatgctgaagattgcatgcctcgtttttggttcgtttgattaaacatgtttaaaagttcaggatgtgctttaaacatttttggataaaagattgacgtaatttctgtccctttctctttaagtaaaggcaccgtttgtttgataatgtctttctcttgttctgtaagcatgatactcctcctttaatctgtctactttgattattctactaattttattgatattcaattgattggtttgagaaaatataaataaattggcaaatttgataattgtatgacatttttatttttttaaatacttacgaataactattgtgtacaattgtgtatttgaaccccaacgattgcgtgcacttatttgactaattcaaaaaacattgttgttttcttagaaaaaattaaacatgataataaaaatgtgaaagtataaataattactggtgaagtacgaagactaaagacatctaagatgtaatcgtatacaaattaaaaaggtgtaaaaattaaaataaaatgtgaaataaatcacaatttaatattgacccggtacttaatgcatgttacattttatatgtgaaataaatcacaaacttaaaagcggatgacacatgaccttttaagttatgcgttgaaaataaaagagatgtttatttgcttttgtatcgtcaataagcagcattaaactaacatatttgaaactacacgtatgttagtgaattaatcataagggagtttttgtaatgaacaaatttaaagggaacaaagttgtattaataggtaatggtgcagtaggttcaagctacgcattttcattagtgaaccaaagcattgttgatgaattagtcatcattgatttagacactgaaaaagttcgaggagatgttatggatttaaaacatgccacaccatattctccaacaacagttcgtgtgaaagctggcgaatacagtgattgtcatgatgcggatctagttgtcatctgtgctggtgctgcacaaaaacctggagaaacacgtttagatttagtatctaaaaacttgaaaatattcaaatcaattgttggtgaagtaatggcatcaaaatttgatggtattttcttggtagctacaaatcctgttgatattttagcgtatgcaacatggaaattctctggtttacctaaagaacgtgttataggttctggtacaattttagactctgcacgctttagattattgttaagcgaagcgttcgatgttgcgccacgtagtgtcgatgctcaaattattggtgaacatggtgacactgaattaccagtatggtcacacgctaatattgcgggtcaacctttgaagacattacttgaacaacgtcctgagggcaaagcgcaaattgaacaaatttttgttcaaacacgtgatgcagcatatgacattattcaagctaaaggtgccacttattatggtgttgcaatgggattagctagaattactgaggcgattttcagaaatgaagatgccgtattgactgtatcagcattattagaaggcgaatatgatgaagaagatgtttatattggtgttccagcagtcatcaatagaaacggtattcgcaacgtcgtagaaatcccattaaacgacgaagaacaaagcaagttcgcacattcagctaaaacattaaaagatattatggctgaagcagaagaacttaaataactttttataaaatctataccattccaaaaattgtaaaaccttaccccaaaaaattgtataaagggctatttgatacaactatacgtgtcgagtagccctatttttaatgtagtgaaagtcgttgttgaaattaaatttaaatctggcacttaagctttaatcatagcattaagatgattgtctagcagaggcgatttgcggactcactacagtgcatgatgaacttaatgcttcaaatgtaacattaaaaataaaagcaacgatgtcacttcttacttcgtacatcgttgccattagttctgttgatatttcggttagtcttaatccccgagcaattcttcaatttcatttttgataactgtaacgtgaggcccataaattacttgcacaccagtgccttgctggattacacctttggcaccagtactttcgagtaatactttatcgactttgtcattttgatgaagtgtgacgcgtagtctcgttgcacaacagtcaacgatttcaatgttatcttcgcctcccaaaccagcaacaatagtttgtgctctttcagtagcctcaacttgttgtgctgcagctttatcttcacgaccaggtgttttgaaattaaatttcgtaattaagaatctgaaaacgatgtaatacaaacagagccacacaattccaataggtatgacgtataggtagtttgttttactattaccttgtagcacaccaaaaagtaagaaatcgataaagcctccactgaaggtttgaccaattgtaatgttgaaaatgtctgacatcataaatgctaatccatcaaagaaggcatggattacataaagaataggtgcgacaaacaagaaactaaactctaaaggttcggtaatgcctgttaaaaatgaagtgagtgcagcggataacattaaaccgccgacaacttttttatgttcaggtttagctgtgtgataaattgcaagtgcggcaccacataagccgaacatcatcgtaataaaacggcctgacataaagcgtgacacacctgaataatacttcgtcacatctggatcaccaagttgagcaaagaagatgttctgcgtaccttgaactaagtgccctttgacttctaaagtaccaccaagtgccgtctgccaaaacggtaagtaaaaaatatgatgtaaaccgagtggacctaacaatcttaagatgaagccataaacaaaagtaccgatggcacctgttttcgttacaaatccaccaacatgataaatgccggcttgtatgcttggccaaatgaaatacatcaatacacctaaaaagattgcggcaaatgctgtgacaatagggacaaatctagagccaccaaagaaacctaaatacggtggtaataccactttgtgatatttgttgtgaagtattgcggtcataatacctgtgataatcccgccaaaaacaccagtttcaaccgtttgtatgccgagcaccatgccttgtccattttgtgcaagctgatcttttgctaatgtgcccgtgatagttaataagccattcatagttgcgttcataattaagaaaccgagcagtgcagctaaacctgcagtacctttatcgcttctagataatccgattgcgacaccaattgcaaagatgactggtaaattttggaaaacaatactacctgcagctgacattaatgtaaaaatattttgtaataaggtaatatctaaaatagggtatgctttaatggtgtttggattacttaatgcaccaccgatacccaacaatagacctgcagctggtaagattgcgataggtaacataaaggacttgccgaactgctgtgctttttcaaataaagatttcatcaacatccctcctaattattctcaatatagcttttgagaaatttaatatcaatatatattctgtgtatgaaaatatttttcataaaaattgtttgaatcatgtaacaatcatataaattgctgtttatattgttgtgaaaatgagttgacaaaagtcggtatagatatgtagacatcctatttttagcgaggtaggttgacaaggcatatcggataaatttataagccataaaataggtaaatagtgtttgtatccaaaaatatgagaaagttaaaactatttttcaaaataaacatgattcaccacataaataaatatacataagctatcgataacaacttaagaaaggtggatatataaatgaaaagaaagattattatggattgtgatccaggacacgatgatgcaatagcattaattttagcgggggcaattgacagtccactagagatattagctgtaaccacagtcgcaggtaatcaatcagttgacaagaatacgacaaacgccttgaacgtattggatattatgggacgccaagatatagcagtagcgaaaggtgcggataggccgttaattaaaccagctgcctttgcttctgaaatacatggggaatctggattagatggtccgaaactaccgtcgacaccatcacgtcaagcagttgcaatgccagcatcagatgtgattataaacaaagtgatgacgagtgatacacctgtaacaattgtagcgacaggtcctcttacgaatgtagcaacggcattgattcgtgagccaagaatcgctgagcatattgaatctattactttgatgggtggtggtacatttggaaattggacgcctacagcagaattcaatatttgggtagatgctgaagcagcgaagcgtgtttttgaaagtgggattactataaatgtgtttggtttagatgtaacacatcaagttttagccgacgaacacgtgattgaacgctttgaaagtatcaataatcctgttgcacagttcgtcgtagaattattgcaattctttaagaagacatacaagactcactttaatatggacggtggtccaatacatgatgcttgtacaattttgtatttgttacaaccagaattgtttacaatggtacccgttaatatcgacattgaacatcaaagtccactaacttatggcactatggctgtagatttaaatcatgttacaggtaagcctgccaatgcctattttgctacagcagttgatgttgaagaagtgtggaacttgatagatcataagttacgtacatacgaataataatacttaattaaatagatacagttaaccctaaggtgcctgatttaagcgtccttagggtttttgtattggattacaatggtcatggcaatttgataatgattgagatatgtatgttaaaaatacttcaaaaaacacaaaatacaaaaatatatgcaaaaatttcaattgctttattttaaaagattaaaattacaaaaaataccgatataattggagtgttgtcgaaacatcacaatgatgtacatactcattttgaaaatatgtgttcaacgagtgtacatcggtgtgacgattgatgataaattgagctcagatgctcaaaggaggatcgaacatgaacggggataatcagcaaatactcagagaaattgtattgaatcctactattcatggtaaagaacttgaatcgatatttggcttatctcgtagacaactaggatatcgcattcaaaaaatcaatttgtggcttgaacaagagggttatccaaaacttgaaagaacaagccaaggaaattttattgtaagttctgaaatcatgacgttattcaaacgagatgtatcggagcagcaaatgttaaacggcaacaatgtcatttttagcatagaaacacgtcgttattatttaatgctcatgctttttagtaaggaaaacgcaatgtctctaaaccatttttcaattgatttacaagtcagtaaaaatactgtcattcacgatataaatcatgtgaaagagcaattggaagatcatggtttgtcacttaagtattctcgaaaacatggttatgaaattgttggtgatgaatttgaagttcgccgtttcttcattaagttgattgatcaaaggttgaatcatgatattactaaaagtgaagttttaaaggcgctcaacttaacattcgaagatatcgcatatcaaaaagacaagattaaacaggtagaacaatttttgaagagtcgctttatagacaaatcactgagttcattgccttacgtcccttgtgtgattcgtagacgaattcaaagtggtcatgtgattaatccattaaatattaattatcagtatttgagggatacgaaagaatatcaagcaacggagattatgacgcaacatgagccggatttgccagaagcggaaaagttatatttgacattacacttactttcaacaagtgtgcaatggactgatttgcaggaatcagataacatatcgaatttaacaacggccattgatcaaatgattcaccattttgaacaaattacttttattaacattgaagataaggagaaattatcacagcaactcttgttacatttaacgcctgctttttaccggattaaatataacctaacggatcgtgatgaattaataaatcctttacaaggaaattatcaatccttatttcatatggtgaaacaatcatgtcaatcgttaactgaatatttcggaaaatcattacctgataatgaaatagcatatttaaccatgttgttcggaggtagtttgagacgtcaagaggagaactttgatggcaagattaaagctattatcgtgtgtacacaaggtacatcagtatcgcaaatgatgctatatgagttgcgaaacttatttccagaaattattttcttagatgcgatttcacttagaacatttgaaaattacacattagattatgacatcgtcttttcaccaatgtttgtcctaacacataaaaaattatttatcacaaaagtagctttatctgaaaatgagcaacgaaagttacgtaaagatgtgatgaagtacattaataaggaatcggctgacattgataaggaaataaacaagttaatggcattaattgaacgcactacgacagttaatgacattacagaactacgtgatggtttagaagattttattgcgaattataattcaatttcaaccattaatggatcgattgtcacacaaaataagacattagatttagctgacttgataccagcaaggcacgtgaaaagaatacatcatgttgaaaatattgatgaagctattgctaaagcaagtgatgtgttagttgctaatcattttattgatattaaatatattcatgagatgcaacaggcatttgatgattcgtatatggttatcatgcaaaatattgctattccacatgcatactctgaaaagcatgtacataaaacggcgatgagtatgttgatattacaagaaccaatatacatgtcagatggcacagcaatccatattattgtacctattgctgctgttgataaagtgacacacttaagagcgttactacaattgagagatgtggcgcaagacaatgacgcaattaagcgcatcatacaaagtcgcaaaaattctgatgtaaatgagattttaaaaaattattcaaataaagaagcgagggaaaatggatgggacagcaattagtgcataaagaaaatataatgctcaatttgtcggcaactgataaagaatccgtattgtcacaaatgtcagatgtgttatttcaaaatgggttcgtaaagtcaacgtttaaagatgcagtcatcgacagagaaaaagagtttgctactggtttaccaacgcatctatgttcggttgctataccgcatacagatgtcgaacatattaaccatagaacgataggtgtggctgttctagaaaaagaagtgccgtttattgaaatgggaacacttgatcaacagacagaagtgaaaatcgtttttatgttagcaatggataaattagatgatcaacttaagctattacaacagttgatgcaaatttttcaaagtgaagaaaaattggagcagattctgcgaacgaaagatgaaacgattttagcaacactaatcaatgattatttggaatataactaaaaattaattggaggaattgaaaatgaaacaagtattagtagcgtgtggtgcaggtattgcaacgtcaacagtagtaaataatgcaattgaggaaatggcaaaggaacacaatattaaagtagatattaaacaaatcaaaattacagaagttggaccttatgaagacactgcagatttattagttacaactgcaatgacaaagaaagaatataaattcccagttatcaacgcacgtaatttcttaactggtattggtattgaagaaacaaaacaacaaatcttaacagagttacaaaaataactgaattgatatgtaacgtgggtcaataacatataaatatatgcaaattgcatataaatgactatcacgacaaatgattgttgatgacatagaaacgcagtgactgtaattcaaagggattgcagtcgaatgtagcaagggttgtcgttgaaatgactgtaacgtcaaatgtaatcacaatcggaaagtatcgtgacaatgcatatataacagggagggtttaaatatgagttacttcactgattttgtaaggggatttttagatttaggtgcaactgttattttaccggttgtcatattcttgcttggcctattctttaggcagaaaattggggcggcatttaggtctggtttaacaataggtgtggcttttgtagggattttcttagtcatcgatttattagttaaaaatttagggccagcagcacaagcgatggttaaaaatttaggcgtcagtctgaatgtgattgatgtaggttggccagcaacatcatctatcgcttgggcatcatctgtcgcagcatttattattccactcggaatcatagttaacgttgtattgctagtaactaaagtgacaaagacgatgaatgtagatatttggaatttttggcattatacgtttacagcagcaatggtttatgccgtatcaggtagtatttggcaagcgttattagcagcagttattttccaagttatctgtttgaaagtagcagattggacagcaccgatgatgagtgagttctttgatttaccaggtgtatcgattgctacaggaagtacaatttcttatgcaccaggtatttacttagttaaattgttgcaaagagtacccggtctgaataagttagatgctgatcctgaaacaattcaaaaacgttttggcgcatttggagagtctatctttgtcggattaattttaggtttaggtattggtgtgttagcaggttacaaacctggagacatcattaatttaggaatgtcaatggctgcagtaatggtattaatgcctagaatggtaaaaatcttaatggaaggtttaatgccagtttcagagtctgcaagaacatggctaaataaacgttttggcgaacgtgaaatttatattggattggatgcggctgtagcattaggtcatccagcggttatttcgacagcattaattttagtacctatcactgttttattagccgttattttaccaggaaaccaagtactaccttttggtgacttagcaactataccatttgttgtcgcgtttattgttggtgcagcaagaggaaacattattcattctgtcattgtgggtacgattatgattgcaatttcactatatattgcaacagacgtagcacctattttcacagatatggcgaaaggtacgaatgtacaaatgccaaaaggttcatctgaaatttcaagtattgatcaagggggtaatatcgttaactatcttatctttaaactatttagtctattcaattaaaaatcgaggtgtttgtggtgaaagctttagtaaaaacaagagaaggacatggcaacttagaacttcttgacaaagaagttgcaacaccgctagatgataaagtaaagattaaagtacattatgcaggaatttgtggcacagatattcatacttatgaaggtcattataaagttaattttccagtgacattaggtcatgaattttctggtgaaatcgttgaagttggagcagacgttaaagattttaaagttggtgaccgtgtcacttctgaaacgacattctatgtttgtaatgagtgtgaatactgtgaatcaaaagactataatttatgcaaccatcgaaaaggtattggaacacaagttgatggcgcatttactaattatgtcattgcacgtgaagaaagtttgcatcatattccagacgaagtatcgtatcagtctgcagctatgacagaaccattagcatgtgcacatcatggcgtttctaagattcaagtcaattcaggcgatgtagcagttgtaatgggacctgggccaatcggattacttgtagcacaagtgttgaaaagtaaaggtgcaactgttgtggtaactggattggacaatgacaaagtcagattagataaagcagaagcattgcacatggattatgtagtcaatttacaacaaacagacttaaaaacgtatatcaatggaattacagacggttacggtgcagatgttgttgttgaatgttcaggtgcagttccagcagcacgacaaggtttggatattttacgcaaaaaaggtttctacagtcaaataggtatttttaaggatgctgaaattccatttgatatggaaaaagtgattcaaaaagaaataacagttgttggtagtagaagtcaaaagccagcagattgggaaccttcattgcaacttatggcggatggtttagtaaatgctgaagctttggtgacaaaaatatatgatatttcgaaatgggacgaggcgtatcaacatttaaaatctggcgaaggtattaaagcattacttaagccgctcgatttagatgaaaatgaaggagagaattaatatggtagaatcaatgctaacttttatgcttgggccattgagacaaatcactgatttttatatggaacatctacttgtaagtaattctatcgtcattgcaggttattttgcgacaggtatttttaaaaagaaaaaagttgtgaattaaatcaaagttgaggtgatttacaagtgaaagctttgaaattatatggcgtggaagatttacggtatgaggataatgaaaagccagtcattgaaagtacgaatgacgttattgttaaagtacgagcgactggaatatgtggttcagacacgtcacgatacaaaaaaatggggccatacattcaaggtatgccatttggtcatgaattttcaggtgttgtagatgccattggaagtgatgttacgcatgttaatgtaggcgacaaagtgacaggttgcccagcaataccttgttatcaatgcgagtattgtttaaagggtgaatatgcacgatgtgaaaagttatttgtcattggctcatatgaacctggatcgttcgcggaatatgtcaaattgccagcgcaaaatgttttaaaggttccagacaacgttgattacattgaagcagcaatggttgaaccatcagccgttgttgcgcatgggttttataaatcgaatatacaacctggtatgactgttgcagtaatggggtgtggcagtataggtttgttagctattcaatgggcacgaatatttggtgctgcacatatcatcgctatagatatagatgcacataaactagatattgctacatcattgggcgcacatcaaacaatcaattcaaaagaagaaaatcttgagaaattcatcgaaaatcattacgccaatcaaatcgatttagctatagaatcatcaggtgctaaagttacgattggtcaaatattgacgctacctaaaaaaggtggcgaggtggtattactcggaataccatatgatgatattgagattgatcgcgttcattttgaaaaaattctgcgtaacgagttgacagtatgtggctcttggaactgtttgtccagtaattttccggggaaagagtggacggcaactttacattatatgaagacgaaagatattaatgtaaagcctattatttctcattttttaccgttagaaaaaggcccggagacatttgataaattagttaacaagaaagaacgatttgataaagtcatgtttacgatttattagtatgcacctttgaggacgaaaaggctggtatagttatagctatgaaagtgcgaatgccgtctggtctacagatactatcgaaataattcatcatcgaatatacgttgctaaatagccggtttacttgtgtgaaatatgcttgtgaatcggttgttttgcattttgtatacttaaaatgagatggcaatatttgataatttttagagtgaaaatcaagtacagccacttaataagataaatttattataatatatggtaaaatgatggcagtaataatgaatttgaaaaagagtaaacattaatacctttaacaatttaatatcgtcagtgttaatgattaactgcatggcaaaacaacttagaatggtcagttacaaaaatacatttttataaaaaattatcacactattgtgacaactgcctttaacttaataaaagaggcaaatgagcaataggttaggcttatgtgcgggcataggtcagtaatgtataaatggaaatgatgtaatgacagaatggaggacaacatgatttatgcaggtattttagcaggaggtattggttcgagaatgggaaacgtgccattaccaaaacaatttttagatattgataataaaccgattttaattcatacaattgagaagttcattttagtgagtgaatttaatgagattattatcgcaacgccagcacagtggatttcgcatacgcaagatattttaaaaaaatataatattacagatcagcgcgttaaagtagttgcaggtggtacggatcgaaacgaaacaatcatgaacattatcgaccacattcgcaatacgcagggtatcaacgatgatgatgtgattgtaactcatgatgccgtaagaccatttttaactcaacgtattataaaagagaacattgaagtagcagcaaaatatggtgcagtagatacagtcattgaagcaattgatacgattgtaatgtctaaagataaacagaacatacacagtatccctgtaaggaatgaaatgtatcaaggccaaacaccacaatcatttaatattaaattattacaagatagttatcgcgccttaagtagtgcacaaaaagaaatcttatcagatgcatgtaaaatcattgtcgaatctggacatgcagttaaattggtacgtggagaactatacaacattaaagtgacaacaccgtatgatttaaaagtagcaaatgccattattcaaggtgatattgccgatgattaatcaagtatatcaactcgttgcaccgagacagttcgacgtcacatataataatgttgatatttatggtaatcatgtcatcgtaagacctttatacttgtctatttgtgcagctgatcaaaggtattacacaggtcgaagagatgaaaatgtactgcgtaaaaaattaccaatgtcactagttcatgaagctgttggtgaagttgtattcgatagtaaaggcgtatttgaaaaaggaacgaaagtagtaatggtgccgaatacacctacagaaaaacacgacgtgattgccgagaattatctgccttctagttattttagatctagtggttatgatggttttatgcaagactacgttgtgatggcacatgatcgtatcgttccgctgcctaatgacattgatttgagtacgatttcatacacagagttagtgtcagtaagttatcatgctatacaacgatttgaacgtaaatctatacctttgaaaaccagttttggtatttggggtgatggtaacttaggttatattacagctattttgctacgtaagttgtacccagaagctaaaatttatgtatttggtaagacagactataaattaagtcatttttcatttgtagatgacatctttacagtaaatcaaataccagatgatcttaaaattgatcatgcatttgaatgtgttggaggtaaaggaagtcaagttgcacttcaacaaatagttgaacatatttcaccagaaggcagtattgctttgttaggcgtaagtgaattacccgtggaagtgaatacacgattagtacttgaaaaaggattaacgttgattggtagtagtcgaagcggctctaaagattttgagcaagttgttgatttatatcgtaagtacccagacattgttgaaaagttagccttattaaaaggacatgaaattaatgtatgtacgatgcaagatatcgtccaagcgtttgaaatggatttatcgacatcttggggaaaaacagtattgaaatggacgatttaataaaccgatgggggaataacaatgacaaaaacgaaacaagcaatacatattgataacatatactgggaacgtgttcagttatatattgaaggacatagtgaaggtgtcgatttaacatcaggacaatttgttctgaggaatttaaccgaaacaaaaacattagaagcaaatgaaatgaaaatagacggtaatacatttaaatgtagattcaacgtcgcaatattagacgatgggtattatttaccaatggataaatatttatttgtttatcatgaccagttagagtatattggacaacttaatccaaatattattgatcaagcttatgcggcattaaatgaagagcaaattgaagaatacaatgagctgactacacaaaatggaaaagcaaactatgtgttagccaacgaagctaaagttttccgcaaaggtggcgtatcacaacatacggtttataccattactccagaaatagcaagtgacgttaacgaatttgtatttgatattgaaatcaccttacctcaagagaaatcaggggtcattgcgacaagcgcacactggcttcataaacaaggccataaagcttcgtttgaaagtagaagtttcttatttaaagctatttttaatattacaaagttactacatattaaaagaagcaaaacaatattattcacatcagattcgcgtccgaatttatcagggaatttcaagtatgtatatgatgagttactacgccaaaaagtagattttgattatgatattaaaacggtatttaaggcgaatattacggatagacgtaaatggagagacaagtttagattgccatatttacttggtaaggctgattatatttttgtcgatgatttccatccattaatttatacggttcgctttagaccatcacaagaaattattcaagtgtggcatgccgttggtgcctttaaaacagttggctttagtcgtacaggtaaaaaaggtggtccgtttatcgattcgttaaatcatcgtagttacacgaaagcatatgtatcatcagaaaccgatattccattttatgctgaagcatttggaattagagaagaaaatgttgtaccaacaggtgtaccacgtactgatgtactatttgatgaagcttatgcaacacaaattaaacaagagatggaagatgaattgccaattataaaaggtaagaaagttattctattcgcaccgacatttagaggtaatggtcacggtacggcacattatccattttttaaaattgatttcgaacgtttagcaagatactgtgaaaaaaataatgcggttgtattatttaaaatgcatccatttgtaaaaaatagactcaatatttcacgtgaacatagacaatactttatcgatgtatcagattatcgtgaagtcaatgatattctctttgttacagacttattgattagtgattattcatcattaatatatgaatacgcagtatttaaaaagccaatgattttctatgcatttgacttagaagattatattacgacgcgtgatttctatgaaccatatgaatcatttgttccaggtaagattgtgcaatcatttgacgcattaatggatgctttggacaatgaagattatgaggttgaaaaagttgtgccattcttagataaacattttaaatatcaagatggtcgctcaagtgaacgtttagtcaaagatttgtttagacgctaatgttggcatatattacttgccatgcaaatgagtcataaggcatagttttcaagaagggttctgacaatgaagtgagcaacatgtcatgatgagaagcaggactatacaatgagaataaccttttgatttttcatgcataagggagtgggacagaaatgatattttcgcaaaatttatttcgtcgtcccaccccaacttgcacattattgtaagctgactttccgccagcttctatgttggggcccacaccccaacttgcattgcctgtagaatttcttttcgaaattctctttgttggggcccacaccccaacttgcattgcctgtagaatttcttttcgaaattctctttgttggggcccacaccccaacttgcattgcctgtagaatttcttttcgaaattctctttgttggggcccctgactagaattgaaaaaagcttgttacaagcgcattttcgttcagtcaactactgccaatataacttcgtagagcatagaacattgatttatgtcccagcctgttccaactgaattgtcattttgtaaaataaaataatcaatccaatcgttatctaattcataaatgtgtaaacacatacgttatgaatggataacgattttttgttatgttaaagtggtacattaatcatgtatttcgtatgataattaacgacaagtgtaatggttaaatgcattttatgatgaaatgctataataggcatggttacaatgagcttgctcatacatattaatataattacaaaaacacgtcggaggtacgacatgattaaaactacaattaaaaaattgatagaacacagtatatatacgacttttaaattactatcaaaattgccaaacaagaatctaatttattttgaaagctttcatggtaaacaatacagcgacaatcccaaagcattatatgaatacttaactgaacatagcgatgcccaattaatatggggtgtgaaaaaaggatatgaacacatattccaacagcacaatgtaccatatgttacaaagttttcaatgaaatggtttttagcgatgccaagagcgaaagcgtggatgattaacacacgtacaccagattggttatataaatcaccgcgaacgacgtacttacaaacatggcatggcacgccattgaaaaagattggtttggatattagtaacgttaaaatgctaggaacaaatactcaaaattaccaagatggctttaaaaaagaaagccaacgttgggattatctagtgtcacctaattcatattcgacatcgatatttcaacatgcatttcatgttagtcgaaataaaattttggaaacaggttatccaagaaatgataaattatcacataaacgcaatgatactgaatatattaacggtattaagacaagattaaatattccattagataaaaaagtgattatgtatgcgccaacttggcgtgacgatgaagcgattcgagaaggttcatatcaatttaatgttaactttgatatagaagctttgcgtcaagcgctggatgatgattatgtcattttattacgcatgcattatttagttgtgacacgtattgatgaacatgatgattttgtgaaagacgtttcagattatgaagacatttcggatttatacttaatcagcgatgcgttagttaccgactactcatctgtcatgttcgacttcggtgtattaaagcgtccgcaaattttctatgcgtatgacttagataaatatggcgatgagcttagaggtttttacatggattataaaaaagagttgccaggtccaattgttgaaaatcaaacagcactcattgatgcattaaaacaaatcgaagagactgcaaatgagtatattgaagcacgaacggtattttatcaaaaattctgttcattagaagatggacacgtgtcacaacgaatttgccaaacgatttttaagtgataacttaaaaacaataaaaaattataaattaattagttaagtgatataaataataaacgaaatgtttgcttgtatgttattatttgtgtatgaaaacgtctgatataatgtaatataggtttaaacaaaatatgctaaaatataagcaaaatatgtataattttaagtaatacacagacaattaaagttttgattttaaaatgagttttcaattgaaaaatgcaacgaaatttaaataattaaatatagatatagttgaatggaggaagtattttatgaaatacgctggtattctagctggaggtataggctcaagaatgggtaacgtacctttacctaaacaatttttagatttagacaacaaaccgattttaatccatacattagaaaaatttattttaattaatgattttgaaaaaattattatcgcgacgccacaacaatggatgacgcatacgaaagatacacttagaaaattcaaaatttctgatgaaagaattgaagtcattcaaggtggtagtgatcgtaacgatacaattatgaatatcgttaaacatattgaatcaacaaatggtattaacgatgacgatgtcattgtgacacatgatgcagttagaccatttttaacgcatcgtattattaaagaaaatattcaagctgctttagagtacggtgcagtagatacagtgattgatgctatagatacgattgttacatctaaagataatcaaacgattgatgcaattccagtgcgtaatgaaatgtaccaaggtcaaacacctcaatcgtttaatattaatttattaaaagaaagttatgcacagttgagtgatgagcaaaagagtattttatctgatgcttgtaagattattgtagaaacaaacaaaccggttcgacttgtaaaaggtgagttatataacattaaagtaacaacaccttacgatttaaaagtagcgaatgctattattcgaggtggtattgccgatgattaatcaagtatatcaattagttgcacctagacaatttgaagttacgtataacaacgtagatatttacagtgactatgtcattgtacgtcctttatatatgtcaatttgtgctgccgatcaaagatattatactggtagccgtgatgagaatgtcttatctcagaaattgccaatgtctttaattcatgaaggtgttggtgaggtcgtatttgacagtaaaggtgtgtttaataaaggtacaaaagtagttatggtaccgaatacgccgacagaaaaagacgatgtcattgctgaaaactatttaaaatcaagttacttcagatcaagtggacatgatgggtttatgcaagattttgtgttgctaaatcatgatagagctgtaccactacctgatgatattgatttaagtattatttcatatacagagcttgtaacagtaagtttgcatgctattcgtcgttttgaaaagaaatctatttcaaataaaaatacatttggtatttggggtgatggtaacttaggttacattacagccattttattacgtaaattatatccagagtctaaaatatatgtctttggtaaaacagattataaattgagtcacttctcatttgttgatgatgtcttctttattaataaaatacctgaaggcttaacatttgatcatgcatttgagtgcgttggtgggcgtggtagccaatcagcaataaatcaaatgattgattatatttcaccagaaggaagcattgcactgttaggtgtaagtgagttcccagtagaagttaatacacgtctagtattggaaaaaggactaacgttgattggtagtagtcgaagtggttcaaaagatttccaagatgttgtagacttatacattcaatacccagatattgtagataaattagcgttgttaaaaggtcaagaatttgaaattgcaacaattaatgatcttacagaagcttttgaagcagacctgtctacatcttggggtaaaacagtattaaaatggattatgtaaatagaaaaggatgaattaacgttggttaaaagtaagatatatatagataaaatctattgggaacgtgttcagttattcgttgaaggacatagtgaaaacctagatttagaagatagtaattttgtattaagaaatttaactgagacacgtacaatgaaggcgaatgatgtcaaaatagatgggaatcaattcgtttgtcgtttcaatgtagctatcttagataatggttattacttacctgaagataagtacttattagtgaatgagcaagaacttgattatattgcacagttaaacccagatgtgattaatgatgcatatcaaaatctaaagccagaacaagaagaagaatacaacgaattagaaacacaaaatggtaaaatcaatttcttattgcagacttacctaaaagaatttagaaaaggcggcatttcaaagaaaacggtttatactgttacacctgaaatttctagcgatgttaatgaatttgtccttgatgttgttgtaacgactccggaagttaaaagtatttatatcgttcgtaaatataaagaattacgaaagtatttccgcaaacaatcatttaatacaagacaatttatttttaaagcgatatttaatacgacgaaatttttccacttgaaaaaagggaatacggtgttgttcacatcagactctagaccaacgatgtctggaaactttgaatacatctataacgaaatgttacgtcaaaatttagataaaaagtatgatattcacactgtttttaaagcgaatattacagatagacgtggcatcatcgacaagtttagattgccatatttacttgggaaggcagactacatctttgttgatgactttcacccattgatttatacagtgcgttttagacgttctcaagaagttattcaagtgtggcatgccgttggtgcctttaaaacagttggctttagtcgtactggtaaaaagggcggaccatttattgattcattaaatcatcgtagctatacaaaagcttatgtatcatctgaaaccgatattccattctacgctgaagcatttggtattaaagagaaaaatgtagtgcctacaggtgttccacgtactgatgtactatttgatgaagcttatgcgacacagatcaaacaagagatggaagatgaattgccaattattaaaggtaagaaagtcattcttttcgcaccaacatttagaggtagtggtcatggtacagcacattatccatttttcaaaattgatttcgaacgtttagcaagatattgcgaaaaaaataacgcggttgtattatttaaaatgcatccatttgtgaaaaatagacttaatattgcagacaaacataaacaatattttgttgacgtttctgactttagagaagttaatgatatactgttcataacagatttattaattagtgactattcatctttaatatatgaatatgcagtatttaaaaagccaatgattttctatgcatttgatttagaagattatattacgacgcgtgatttttatgagccatatgaatcatttgttccaggtaaaattgtgcaatcatttgacgcattaatggacgccttggacaatgaagattatgaaggagaaaaagtcattccattcttagataaacattttaaatatcaagatggccgatcaagtgagcgtttagtcagaaatttatttggtagctaagtttatatagtagtcaaagtgggagaggtataatgatgaaattttcagtaatagttccaacatacaattcagaaaagtatataacagaattactcaatagccttgcgaaacaagattttccgaaaactgaatttgaagtggttgtagttgatgactgttcaacagatcaaacgttacaaatagttgaaaagtatcgtaataaattgaacttgaaagtaagtcaactcgaaacaaattctggtggtccaggtaaacctagaaatgtggcgttaaaacaagcagaaggtgaatttgtattatttgtggactccgatgactatataaacaaagagactttaaaggatgcagcagcatttattgatgaacatcactcagatgtcttattgattaaaatgaaaggtgttaatggtcgtggtgtaccacaatctatgtttaaagaaacagcacctgaagttactttgttgaattcaagaattatctatactttaagcccgactaaaatctatagaacagcattactaaaagataatgacatttattttccagaagaattaaagagtgcagaagatcaattatttacaatgaaagcatatttgaatgcaaatcgaatcagtgtgttaagtgataaagcgtattattatgctacaaagcgtgaaggggaacatatgagtagtgcgtatgtttcacctgaagacttttacgaagtcatgagattgattgctgtagaaatattaaatgcagatttagaagaagcccataaagatcaaatcttagcagaatttttaaatcgtcattttagtttttctcgtacgaatggcttctcacttaaagttaaagtagaagatcaaccacaatggattaatgctctaggagactttatacaagcagttccagtacgtgtagatgcattggtgatgagtaaattacgaccattgttgcactacgcgagagcgaaagatatagacaactatagaactgtagaagaaagttatcgtcaaggtcaatattaccgttttgatattgtagatggtaaattaaacattcaattcaatgaaggcgaaccatactttgaaggcattgatatcgctaagccaaaagtgaaaatgacagcattcaaattcgacaaccataaaattgttacagagctaacgttaaatgaatttatgattggcgaagggcaatatgatgtcagacttaaattacattcacgaaacaaaaagcatacaatgtacgtacctttaagtgtcaatgcgaataaacaatatcgttttaacattatgttagaagatattaaagcgtatttacctaaagaaaaaatttgggatgttttcttagaagtccaaataggtacggaagtatttgaagtgcgtgttggtaatcaacgtaataaatatgcgtacactgcagaaactagtgcattaattcatttgaataatgatttttatagattaacaccgtatttcacaaaagactttaataacatttcgttatactttacagctattacattaacggattcaatatcaatgaagttaaaaggtaaaaataaaatcattttaactggtctggatcgtggttatgtatttgaagaaggtatggctagtgtcgtgttaaaagacgacatggtgatgggaatgttaagccaaacatcagaaaacgaagtgcaaatcttacttagcaaagatattaaaaagcgagacttcaaaaatattgttaagttaaatactgcacatatgacttactcgctaaaataaataataaatgccctcaaatctatgtgaactaacatgatttgagggctttattatgctgtttatgacatgattatgacatttcctcgtttatcattttcaaatacattaaattgtatacactggaaatgaggaggttatctataatgataaataaaaatgacatagtagcagatgtagtaactgattatccgaaagcagcggatatttttagaagtgtgggaatagatttttgttgcggcggacaagtaagtatagaagcagcatccttagaaaagaaaaatgtagatttgaacgaattattacagcgtctcaatgaagttgaacaaacgaatacaccaggttcgcttaatcctaaatttttaaatgtttcgtcacttattcaatatattcaagcagcatatcatgaacctcttagagaagaatttaaaaatttaacaccttatgtgacgaaattatcgaaagtacatggacctaatcatccatatttagtcgagttaaaagaaacatatgatacatttaaaaatggcatgttagagcatatgcaaaaagaagatgatgttgattttccaaaactaattaaatatgaacaaggtgaagttgtagacgatattaatacagtgattgatgatttagtatctgatcacattgcaactggacaattgttagtgaaaatgagcgatttaacatcaagctatgaaccaccgatagaggcatgtggtacttggcgactcgtttatcagagattaaaagcacttgaagtgttaacacatgagcatgttcatttagagaatcatgttttatttaaaaaagtatcataaataacgcgattagaaactgttggcaaaaataagtccagcagtttttcgctatgtataaaagtcataatagtgacatgaacatcattatttgaaaagaaaaatgatcaatatagcataagaaatgatatgaaattttaatgctttagataattaaatcgtagcgtgattttttaataatttattcatgaattttacatgcactattatgataaaataaacataattataattcactgaggtgctatcgtgctatcgctaacaatgttattacttgagcgtgtaggtttaattattattttggcctatgtgttgatgaatattccttattttaaaaatttaatgaatcgtcgacgtacatggaaagcacgttggcaattatgtattattttcagtttgtttgccttaatgtctaatttaactggtatcgtcatcgatcatcaacatagtttgtcaggaagtgtgtacttccgtttagatgatgatgtatctttagctaacacacgtgtattaacgataggtgtcgcaggattagttggtggtccttttgtaggtctatttgttggcgttatttcaggtattttcagagtgtatatgggtggggcggatgcacaagtttatcttatctcatctatatttatcggtataattgctggttattttggcttacaagctcaaagacgcaagcgttacccgagtattgcgaaaagtgccatgattggaattgttatggaaatgattcaaatgttgagcattttaacattttcccacgacaaagcatatgcggttgacctcatatcattaattgcactaccaatgattattgttaatagcgttggtacggcgatttttatgtctattatcatttcaacattaaagcaagaggagcaaatgaaggctgttcaaacacatgatgtactgcaattgatgaaccagacattgccgtattttaaagaaggattgaatagagaatcggcacagcaaattgcgatgattattaaaaatttaatgaaagtatctgcagtagcaattacaagcaaaaatgaaatcttatcgcatgtaggtgcaggtagtgatcatcacataccaacaaatgaaatattaacaagtctgtctaaagatgtattgaaatcaggaaagttgaaagaagttcatactaaagaagagattggttgtagtcatccgaattgcccgcttagagcagctatcgtgataccacttgagatgcatggttctatcgtcggtacattgaagatgtattttacaaaccctaatgatttaacttttgtggaacgtcaacttgcagaaggattggcaaatatttttagtagccaaattgaacttggtgaagccgaaacgcaaagtaagttattgaaagatgctgagattaagtcattacaggcacaagtgagtccacattttttcttcaattcaattaacacgatttcagctttagttagaataaatagcgaaaaggcacgagagttactattagaattgagttattttttcagagcgaatttacaaggctcaaagcaacatacgattactttagataaagagttaagtcaagtgcgtgcatacttatcactcgaacaagcacgttatccaggaagatttaatatcaatattaatgttgaagacaaatatcgagatgtgcttgtaccaccatttttaattcaaattttagttgaaaatgccatcaaacatgcgtttacgaatcgaaagcaaggtaacgatattgacgtgtcagtgattaaagaaactgcaacacatgtacgtattattgtacaagataatggtcagggtatttctaaagataaaatgcatttgttgggagaaacatctgtagaatcagaatctggaactggtagtgctttagaaaatttaaacttacgcctaaaaggattatttggaaaatccgcagcattacaatttgaatcgacatcgagcggtaccactttttggtgtgtacttccttatgaaagacaagaggaggaataaatatgaaagcattaatcatagatgatgagccattagcacgtaatgaattaacatatttattaaatgaaattggtggttttgaagaaattaatgaggcagaaaatgtaaaagaaacattggaagcactactgataaatcaatatgacattatatttttagatgtcaatttgatggatgaaaatgggatcgaattaggagctaaaattcaaaagatgaaagagccacctgcgattatttttgcaactgcacatgaccaatacgcagtacaggcatttgaattaaatgcgacagactatattttgaaaccgtttggtcaaaaacgtattgaacaagcagtcaataaagttcgtgcgactaaagccaaagatgataatagcgcaagtacaattgcgaatgatatgtcggcgaattttgatcaaagtttacctgttgaaattgacgataaaattcacatgttaaagcaacaaaatattattgggattggcacacataatggtattacaaccatacatacaacgaatcataaatacgaaacaacagagccattgaatcgttatgaaaaacgattgaatcccgcttattttatacgtattcatcgttcatatattattaatacgaaacacattaaagaagtgcaacaatggtttaactacacttatatggtaatattgacaaatggtgtcaagatgcaagttggacgttcatttatgaaagattttaaagcgtcgataggattactttaacagtaatccttttttttatgcattttacctatgatattttgtatttcggactaaaattcacgcaaatcgaagtgagccatctatactttagttaaatcaaacgtaggaggcaatggtcgtgaaacaacaaaaagacgcatcaaaaccagcacacttttttcaccaagtcattgtaattgctttagtactctttgtatcgaaaataattgaatcatttatgccaattcctatgcctgcatcagtaatcggtttagtattattatttgtattattatgtactggtgctgttaagttaggcgaagtcgaaaaagtaggaacgacactaacaaataacattggcttactcttcgtaccagccggtatctcagttgttaactctttaggtgtcattagccaagcaccatttttaatcattggactaataatcgtctcaacaatactattacttatttgtactggctatgtcacacaaattattatgaaagttacttcgagatctaaaggtgacaaagtcacaaaaaagatcaaaatagaggaggcacaagctcatgattaaccacttagcactaaacacaccttacttcggaatactgttatccgttataccatttttcttagcgaccatattatttgaaaaaacaaatcgtttcttcttattcgcaccgctatttgtcagtatggtatttggtgtggccttcctctatttaacaggcattccgtataagacttacaaaataggtggagacattatttacttcttcttagaaccagcaacaatctgttttgcgattccgttatataaaaagcgtgaagtgcttgttaaacattggcatcgtatcatcggaggtattggtatcggtacagttgtagcgttattaattattttaacttttgcgaagttagcacaatttgccaatgatgttattttatcaatgttacctcaagcagcaactacagcgattgcgttaccagtatcagctggtatcggtggtataaaagaattaacatcattagcagttattttaaatggtgtcattatttatgccctaggtaataaattcttgaagcttttccgaattactaaccctattgcccgaggattagcacttggaacaagtggtcacacattaggtgtagcaccagccaaagaattaggacctgtagaagaatcaatggcaagtatagctttagtgttagttggtgtagttgttgtagcagttgtgcctgtctttgtagcaatattcttctaaaacgaaaaccctaagcaagataatagcagtttgagccattgttattatcgtgaaaaaacgtctatactccgttttataactgggatatagacgtttttatgtatgtactactttttactaggaattatggtatttaggcgttcgttttatgtattgccacttttgaaaaatggtagaacgaattaatttaactaggaattaaaatgtaagttatatcatttgtgaaatttcaattaaatatttttcgacaaattcttgaaattacttaatgtcatcaacactttataaaaaaacggcgtatgcttatatgtaagaatgcaattaagaggagattttataaatgagtatgcaaagttcatataaacgtttagttaaagtgctactaacgattttagtgattgtgttttcaattttactagtaggtggttggtatatttttaaaaatgaagcacctcgtccaacaaagatagtagatcaacaaggtcatacgcttgttacaaaaggcgagctgatcagtgggcaagcgatatatgagaaatatgggttaacagattatggctcctacctaggcaatggttcttacttaggcccagattatactgcagaggcattacatcattatctgattggtatgcgtaaatactatgcacaagatatttatcataagcaacttcataaattaaatcatgtagagatagccgtagttaaagataaagtgatgaaagaaatacggattaatcgttattctgaaaaagaagatcaacttgtattaacgccaggacaagtatacggtctaaaatatttgcaagattattataaaaaagagtttgttaataaccctaaacaagtagggttaaatgaaaatatgattaaacagtttcaaaatgatgattatatggtcgcaggaaataaaattgaacatttaagtcaattctttttctggggtgcttggctatcatcaacagatagacctggaaaaacattttcatatacaaataattggccatacgatgtggatgcaggaaatacgttgcctagtgcaggaattttatggactgctatatctgtaacattactgattgcaggcttggcattcattatatatattcaaaagcgttatgaatttgacatgaagccgacgtatgagtcggaacgggaactaccaaagattgaagtagatagtaaaatcactgatagtcaacgaaaagttgggaaatatttagtcgttgtcatgttactatttttggttcaaatattattaggcgaattactggcacattattatgtagagaataaattttttggtatagaaatacaaaggctctttccatttaatattgtgaagacatggcatgttcaattagttattttctgggttgctacgacttggttagcagcaggaatatacattgtacctaaagtattgggcaacgaaccaaagaaacaaggcgtattagtagatatcttgttttgggccttaatcatagttgtgatgggcagcatgattggagaatggagtcatattttaggttggattgattctcattggtggctattcgggcactttggttgggaatatatagaattaggtaaattttggcaaatattatttatagtaggtatggtcttatgggttatcattctttgtcgagggtttttaccagctattcgcaacaaagtacaagtgaatcatgataaacgtcacttattgacgctattgtttgttggagcaattgcaattccgttattttatcttgcatcattatttataatgccgaattcacatgtgacgtttgcagattactggcgatggtggattgttcacttatgggttgaaggtatatttgaagcatttgccgtagtgttaattggtttcttaatggttaatatgaaattaactaccattgaaacgacgattcgtgcattatattttcaattaatcctattactaggtacaggtattgttggtatgggtcatcattactattggcaaggtgatcattccatatggctagcactgggttcttgtttttcagcattagaagtcgtgccactttgtttattaatttgggaagcatacacacactatcgcttatataagaaaagtgacatcgcttttccttacaaaggtacatttatttttctagcttcaacaggattgtggaatgcaattggtgctggagcattaggctttttaattaacacaccagcagttaactactttgaacatggtacgcaatggactgcagcacatgcccatggttctatggctggcgtgtatggtatgttctcaattgcaattgcgttgtatgtttttaaaaatattactaaaaaagaattttggacaccgaaagttgaaaaatggattaaaatatcatgttgggctttaaatgttggattggcaggtatggtgttcgttacattaataccagtaggttatatccaacttaaagatggattagaagatggttattggcattcaagactaacgtcattttatgaacaaccacttgtgaaagcaatcatgtggggtagaatgccttgggacattatattcacagtaggtgtcattatattagtagttatttttataaggggatacagacacttaaaaccaaaatacagagtatagatcatcatattactgagtgatcttagtgtgttttaacgtttgagacgaagagatattatacaataggattcaaactataagttcttagattatgtaaatataaagaacagtgaaaagtaattttctgattgaaaatgtacttctcactgtttttaaagaaattatgtcctataaaacgtctatactccggtttataactggaatatagacgtttttatgtatttattactttttactaggaatataaaactgtgcatgacgataatgaaatacgatgtcagatgaatcaaaaggtttgccagtcattgtataaaacgtttggtgataacgtaaacatggttcacctgtagacaattgtagtaatgaagcttcacttgaagtgagttgatctacattaaagaaaatatctgaaaaaccaatacgaagtttcatgtttgattctaaatagtcgaagatagagcccttagcaatatcatcatttaaatatttcacgatttctttatgataataagaatattcgatacataaaacatcatcgtccacgaatcttaatcgctctaaatagtagacggtatcatctgcatttaattggagttcatcttgtacagatttaggtggcgttgcaatctccttaaaaacaagtaccttacttgtcattcgatgttcacctaaacttttagagaaaccattagtcttaaagacgttgatacgattggcatctgcaatatttctcacataaataccactgccttgtgcttgatagatcaaaccatcttgttccaataagcctaatgctttaatgatagtactcttacttacttgataacgttcttttaattgcgtcacgcttggcaatttatcaccgggtttgaaattagattgatgtataaacgcattaagttgcttagcaatatgttcatactttaacaatattctgtcctcgtttcactttgtctgtaattattatagcacaaaatattataattgtatcggcgtttacaaattgaaccggtacaattataattagaggtaagtaaatacattttcattctactatcaagttgagggggtaatatttatgagtaataaatataaagaccaagcccaagacattcttacagctgtgggtggtgtcgaaaatattgttgatgtttcgtatgatacggtacgcatgaccattcatatgcatcatgcaattccttctactgctaatgaagtaacacaaatagatggcgtggcgtcagttgatgaaaatgaaacacagttagttatcgtatttaatgaagaagtaaaatatgtatatcaacaattacaattgttaatggacgacgccaagcatcaagaagatacgaatcatgatgctgtggatactcaagaaacagaacagaaagcgcaagcaaaagtgacaacaccgattttagtgaaagcacccattgctggtcgtcgtatcttgcttaaagaagttagagattcaatttttagagagaaaatggtaggcgaaggtttggcgattaaagcgcataaagaatttaaagtgattgcaccatttagtggtaaagtctcaatgattgtacctactaaacatgcagttggtattcaatcagaagacggtgtggacatagtcattcatattggtgtgaatacagttgacttagaaggtaaaggattcaagtgctttgtaaagcaaaatgatcgtgttgaagctgggcaaacactgttacaattcgatcaacaatatattcaggaacaaggttacaactcagacgttattgtcgttattagcaattcttcggactttaacaaagtagaactgacaatgaatgaaatcattacgactgaagatgttatttttaaaatatttaaaaactaggagtgtgttgtaataatgacaaaattaccgcaaagttttatgtggggtggcgcacttgccgcaaatcaatttgaaggtggatatgataaaggtggcaaaggattaagtgtaattgatgttatgacgagtggtgcacatggcaaagcacgtcagattacagaatctatagatccaaatcactattatccaaatcatgaaggtattgatttttatcatcgttataaggaagatattgccttgtttaaagaaatgggattgaaatgtttacgtacgtcgattgcgtggacacgtatctttccgaatggggatgaagatgtgccaaatgaagaaggacttgccttttatgatcgtatctttgatgaattaattgcacaaggtattgaacctgttgtgacgttatcacattttgagatgccacttcatttagcgaaacattatggtggatttagaaatagagaagttgtcgattattttgtgcattttgcgcgtgttgtatttgaaagatataaagataaagtgacatattggatgacgtttaatgaaattaataatcagatggacacatcaaatcctatctttttatggacgaattctggggtagcattgacagaaaatgataatcctgaagaagtcttgtatcaagtagcacatcatgaacttttagccagtgctttagcagttcgtcttggtaaagagattaatccgaagtttaagattggaacaatgatttcacatgtacccatttatccatattcgtgtcatccgaaagatatgatggaagcacaaattgcgaatcgcttacgtttctttttcccagatgttcaagtgagaggttattatccaagctatgctaaaaaaatgctggcacgaaaaggatatgatgttggatggcaagaaggggacgacagtattttacagcagggcacggttgattatattggctttagttattacatgtctacggctgtaaaacatgatgttaatactacagttgaaaacaacatcgtcaacggtggtttgaatcattctgtggagaatccgcatatcgcaacgagtgattggggttgggcgattgatccagatggcttaagatatacattgaatgtgttatatgatcgttatcagttgccactttttattgtggaaaatggttttggtgcagttgatgaagtggtagatggacatattcatgatgattatcgcattgaatatttaaaagcacatattacagcagcgatagaagcagttgatcaagatggtgtagatttaatcggttatacaccatggggaatcattgatattgtttcatttacaactggtgaaatgaaaaaacgctatggtttaatatatgttgatcgagataatgatggtcatggcacgatggaacgcttgaaaaaagattcgttctattggtatcaacaagtgatagcatcaaatggagataaattataaaggtatattataagtattttagggttagagtccgaggcgtaaattaatatagtaggccctagagtgttatattggcggatccccaacacagaagctggcgaaaatacagcttacaataatgtgcgagttggcaggcctccaacacagagaaattggaacagcaatttctacagacaatgcaagttggcggggccccaacacagaagctagcgaaaagtcagcttacaataatgtgcaagttggcgggggccccaacacagaagctggcgaaaagtcagcttacaataatgtgcaagttggggcaggacagaaataaattttgcgaaaatatcatttctgttctactccctttaacatttctgttctaataccttgatgttaaaattttaagaaaaaaataatgccactaactaagtatgtatagtgttaatgtttgagtgtttataaaagtctttaaccaaaattgatgacttactaatcaacgataacgatattgttaagtagatgattagtgtcacaaagaaattaaattgacaatcaaacatagatacaaagtacagttagtggcattatatttagtgctcttttttagcgacaaaagtaatataattcatatctttacgcagtctagtcatcgttttaaacattttacaaaacattggtcgattttctttttttaaagcattgttgataatctttatagttccaacaataccttcgtcataaattaaaccttttggtgtcattaaactcattggaccagtatgataatgcacatgattaaaaccagcttgatgatataaatctaaccagccaagtttcgtctgcggtgagacattgacattaattgctgcagataatgatttaactacatgtgtggcatgtgattcattaacgatgacaatatcatgtgttaacaagatacctccaggctttaagactcggtagtactcgcgtaatgctttttcctttatggcgatgggtaacattgttaacattgcttcatttaaaacgatatcgaattgattgtcatcaaagggcaatttaacagcattcgcttgttgaacttgaatatatgattcaagacctgctgctgagatattttcctgtgctttttctaaagctttcttatttatatcaacgccttgaatgtgacagccgtatgtatgagctagataaatagatgtcgtacacatattacatgccacttctaacacatgcttatcttgtgaaaatgccccttgttgtattaaccaatccgtggctgctttaccaccggggcgtagacgagtttttcctaatttagctaaaaatgtatgaccagcttctttagacataacgtaacctccttattaattgataatcattatcattaatatagcatatttatatgcgataatttgaaagttaaacagatgacaaaaaattgtcacttcatatataactaaacatgagttatcaagcataggtttagtggaaaattatttctaatagatgatgttttataaaggtaaaaaagcacagccatgatatacgaatgttgcatgttatacgctaaaccttcatatcatagctgtgtttgattcatttaaacttgatttacttcttctagtagaggaatagatgcttgcgcgccgtgtttttgtacagtgagtgagctcgctttattaccaaaatcaatagcatctgctaagttatcttgcgacttgtttaagcgactgacaaatgcaccaataaatgtgtcgcccgcagcagttgtatcaatcgcatttactttataagcttcgatgtgttggctttgatttttagtagcaaaatatgtaccttgcttacctaacgtaatcaaaacagtcttaatgcctaaagataaaaagtaattagcattgtctttcatagattgttcattagttactttaatcccagataacaattcagcttctgtttcgtttggcacaataatatcgattagtgacaataattcattaggtaatgctttcgctggtgcaggatttaatactgtcgtcacaccatgtgccttggcaatttcaaatgcagatataatagccgggatgggtatttctaattgtgcaacgacaaagtctgcattgattatagcgtcttttgcgttaataacatcttcaggtgtcattgtcatattcgcaccaccataaacatagatggtgttttgtccttctgcattcacagtgataaaggcttgtcccgttttttcttcagttgttttgataatatatgatgtatcaatatgagctgctttaaaatcttctaagatgaaatcagcaacgccatcagtgccaattttagtaataaatgttgtgtctgcttgcatgcgtgcagtagcaatagcctggttggcacctttacctccgccgaatgctttttgtgcttcttcaacatgtaatgtttcgcctggttgtgcatatctttcaactgttaaaaattgatcgacattcgttgaacctaaaataacaactttgttggtcatgtgtatgctcctttcaagttataatttttaaaaagtaacattcgattctaatgcaatattagagtagggcgttgtttcaccagtacgaatattacctttatttaatgggtgagctaagttacttttcatttcttcgtgaggaatgaaaatgatttcgatttccgatgaaatcaattgtttaatttgttgcaattgtgtagggttatgttcttttatttcttctgctaagtatattttttggatttccatttcttctaacactgtagctaagacatcaataaagcgtggtaagtttttagttacagctaggtcgatacgacgatgatcatttggaattggcatgccagcgtcattaatcgttaatagatcaaaatgaccaattgtcgcgattgcttttgaaatatgttcatttaaaacagctgtttttttcatgacatctacactccttattttataaatactgtaacagaagcggctactaaaatgagtactaagccgataattgtaataaccatttcttttgacgttttatgttgttttaagaaataaataccagttaatgtagcaagcacaacggatgtttgagaaagaataaatccagttgctaaaccattcatattaggttgtgctgaaataagatatgttaaggcaccaaatgcaaagaagaaacctgaaataatttgtaaccacgtaattttattacggaatggattctctgctttcatattcataaagccataaatgactgcaacaattaccatacccattgcttgaggtaaaaaggcagttaggccatcaatagaagttgcttgcggtgcagctgaatataaccagtatccaaattcaccaattaacagaagtaccactgcacgacgtaaatttttggcgttacttgcttctttgcgttcactccaaactgtcatacgcgcaccaattagaataacgactaaagctgtaaatccaatgattctatgaccaatgcctggccaatttcctaatgcaaagacaccccataaagatgcgcctaataattggaatgctgttgtgactggcatggcacgagatgaaccgactaattcgaacgctttaaatgtaatgatttgtccgaatccccaaccagcacctgataataaggcgaatagcaaattggttccagtagggaagccgcttgatgtgactacggctaatataatagcgaagattaacgtacctacagtagcaccgataatttgatgtacaggtttaccaccaaactttgaagcgactgttgggaagaatccccagccaattaaggggcctaacccgataagtaatgcaacaatgctcatgttatacacctcacgatttgtttttagtaaaacgttttaccagtgccatcgtatcatttttatttgtaaaatgcatgcgttttcataaaaactgaaaacgtttaaatcatatttaaaaattcatacattattattttaatttcttagtgaaataattatgattaaaaaccctcagcattaaagcaacgctaagggcataacaatgatgagtatatttcggaagatacgtagttagtttgaaagatgatagccagttgttgcacggatttttaaagtcgttggtaattcaatcatatcaatggatttatctaagtgctgtaatcgttgaagtaataaggttaaagatgttttgccaatatcagttataggttgtgccacagtagttaaaggtggcgagacgtacgctgcataatcaatgtcgtcataacctattaatgagatgtctttcgggatgctgatgccatgttcaattagtcctcgtaaaatgccgatagcgagttcatcgttaatagcgaagattgcagtggcagattgaaccatgatgtcatcaacaatggttagcccaccacgcttagataattcagtatggacgatttgtggttctggcaattgattcgcgcgcaaagtatcaacaaatccagtgacacgggtcgacatattcgccatcatgtcatatggtgcaacaatcatcatattgttgtgaccgagttctattaaatgttgtgctgcaagttgtccgccttgatattcatttgtccgaacaaaatctgtatagccttgatggtcattttgatccagtacgacataaggtacatgatgtttctttagatagttatttagggcgtccggggatgaaatgtactgtgcaataattaatccgtcaatacctcgatcaattaaatgtttaatattgtcatacaaatcagttgcagtagatgttaaaaagcataaatcaacatcagatggtttgtggtcatgaatactttgcatcagtgctgagaaaaacggatttgttaagctaggcaaaatgacgccaatagtttgaattttactgccgcgcaattgttttgcatgtttattaggggcatagcctaaacattctgaaacggcatgtacgttttttatcgttgttgcggaaaaacgactatcattatgatttaaaatatgtgacacagttgtaactgatacaccagcttctctagcaacatctttaattgacacttttttcatattatattccttctctttattgtgtaattaatcatacagttatatacccgattattatattcatcatatcatgataagcatttgatgacatatgaagaggtgcatgacttttattgtctacaaacagacgtctatagtatgcgattaaggttgagacgagagaatatattattaaggttaaataacttttaatgattatgataacaagaattttaaaatgtttattgtgatgaaaaatacaaaagtcattattttaaagaataaaatatttgtttttgaaaaaagtattaaaaaacataacaaaatgatgtatattgaactatgtgattgaaaaaaattttaattaaggcttgttaaaacttaagagaggatgtttttaaatgcaattcaaattaaaagaagaagagattattagttttttagaattgaaatatccagaaaaagagttcgaatatggtcgtttgttagttggacaacataaacgtgatgatttagatgtttattactttggtgatacgtttttaatgtgcacgattatttcattcaagacatttgaaattaaagaaacagtagaattatcatatgatgctgttaatcgtattgtgttaaaagatggatggttatttagaaaaatgagaatagaaacaatgcaaaaagtgttaaaatacggtacatctaaattaatgttaactgattttcaaaaggacaattataataaatatattcaaggtcagaaacaacgcgtgatatttgaaaatggccattttgtctaattgatagtgaataataattagagtaagcgaagaacaataaaaaatgttcttcgcttatttttatagaaattgatgcatatcattttaaagtgataaagatatttcgaaacataaatcttctattatatttaagatttaactgtttttggaatgatcatgtatgcagacaatgagccgagtatcattaatacaatgctgacgataaatgttatagttgcagctacacttggtgcatagtttagttgtaacatactgaaaactgtagtacttagtgctataccaaaggcgccacctagtgtgccactcattttatataatcctgtagctaaaccaactttttcattaggcatactgaaaattgcaattgtaaggccgggtgttgcgactaaaccatttccaattgcgcaaatgacaaacccaataacaacagcaatgatatattgtgatggttgaagtgatgtcatgctaataatagtgatgccgatgacagggaacaacggaccaatgatgagcatcaatttgccaccgaaacgtaatgttgctttttcacctaaacgaatcatcgcaactgccacaatggcatatggcaatgtaacaagtccagattgcgcagctgataaaccaaggtgtgtttgagcatatatgaaaaagaccactgttacgcctagaccactatttaaaacaaagttatttaaaaatgcaccaatgaacggacggttgcgtaatactgagaaatcaataaaaggtacttcatgtcgacgttcgatgatgatgaatatcaacgtagtgatgataataatgctcagacaaatgaatgaaaatgtactaaaccaaccttgttcgaatccttgtgttaacaataatgtaaagctaccaatcataacagcgaaaatagacatacctttgtaatcgaatggatgacgatggctatgttgacttactttttcaggtgtgccttttagaagtaatatggcaatgaaagcaatgactatactaatgatgaaattcgtttgccatccaaaatttgtggcgattaaaccgccgataacaccagctaggccgatgccaccaacagtactaatcattagataactaatcgctcgtcttaaatgatctcctttaaattgattatttaacacgccaactgttgaaggtaacaagatagctgctgatagaccttgtaaaattctaccgatgatgagcagtgcagtgatgtccgatataattaatagaagagatgcaaacatactgattatgagacccatgtatgtcattctcagttgtcctattttatcagcaatatcacctgcagccaccatgaagatacctgtggcgaaggaagttaaactaatagataaatttaacacggcaggagaggtttgatacgtttgaccaacgagagggcctatattaataaatgattgtgcaaacaaccaatatgttaatgcagacaacataatcgcaataataatattactgcgcggtgaagattgtgtgttattcacagatgtcactccttgtaaaaattaaatatagaaagtcatgagatgaagtgaacgaatgtatagatgatcgtacactcacacataagtcatgatttccttacatatcataccacagttattgagaatgaatatcaattaattgcttgtatgattgattttttatagtatgtttaagtgaaacagctttatttgaaagtgattaaagtaaatgaaggtacagaggagtgaggacaatgtgcacaggattcacaatacaaactttaaataatcaagtacttcttgggcgcacaatggattatgattatccattagatggttcgccagcagtgacgcctagaaattatcgttggacatctcgcactggcacgacaggccaaacacaatatggctttattggtacaggaacagatatggaaggttttatttatggtgatggtgttaatgaacatggcgttgccatttcaacacaatatttccgaggttatagttcatatggatcaatacacaaagcggacgcgatgaatattacgcaaaatgaaattgtgacatggattttgggatatacaacaagcattgaagatatgaaacaacaagcatcccaaatacatgttgtagctgtatatttaaatgatatcggtgaagttccgccattgcattatcatgtttccgatgcaactggacattcagtcgaagtttcatttaaagagggggaagtggttataaaagataaccctattggtgtcttaacaaatcatccagacttagattggcattatagtaatttaagacaatatatcaatatttctccttatccagcaccagcaaatttattggaaggtgtaacgattgaacctttaggcaatgaagcaggtacatttggattgccaggtggatttacttcaactgagcgctttgtgagaatggcatttatgaaagcaaacattgctcaaaacaatgataaagaaatggatttaatgaatgcattttatttattagatgcggtaaatataccgattggaattgtacgtccgcatgatgctgacaatcactatacgatgtatcagaccgtaataaatttaactacaagaacgttatatattaagtattatggcagcaatgaaatagtagcattaaagctcacagatgatttaattaatagaaaagatatgacgatttttaagcctgagaagcatatcactattagaaagttgaatgacaatcaatagcgattgataatggaatttggttgatatgatttgatggatgattactatcatacattagcgttgaatcgtgaacatggacgaatgattagttgttaattttgaaaatttataaaaggttaagcgaacgcagtgagagatgtcattttaatatcaatgtatggctattttgtaatgacaatgtaatgagtttagtaaaacatttcgggaatattaaatagttggaaaatgagaattaaatcctttactcagttgtctaattcttttagtatgtgcagtacagtttaattgaaaactaactttaactttaatggaggatgttttatacatgaaaaaattaacagcagcagcgattgcaacgatgggcttcgctacatttacaatggcgcatcaagcagatgcagcagaaacgacaaacacccaacaagcacatacacaaatgtcaacacaatcacaagacgtatcttatggtacttattatacaattgattctaatggggattaccatcacacacctgatggtaactggaatcaagcaatgtttgataataaagaatatagctatacattcgtagatgcacaaggacatacgcattatttttataactgttatccaaaaaatgcaaatgccaatggaagcggccaaacatatgtgaatccagcaacagcaggagataacaatgactacacagcgagtcaaagccaacagcatattaatcaatatggttatcaatcaaatgtaggtccagacgcgagctattattcacatagtaacaacaaccaagcgtataacagccatgatggtaatggaaaggtcaattaccctaatggcacatctaatcaaaatggcggatcagcaagtaaagcgacagctagtggtcatgcgaaagacgcaagctggttaacaagtcgtaaacaactacaaccatatggacaatatcacggtggtggtgcgcattacggtgtcgactatgcaatgcctgaaaattcaccagtttactcattaactgatggtacagtagtacaagcaggttggagtaactatggtggcggtaatcaagtaacgattaaagaagcgaacagtaataactaccaatggtatatgcataataatcgtttaactgtttcagctggtgataaagtcaaagctggtgaccaaattgcatattcaggtagtacgggtaattcaacagcacctcacgtacacttccaacgtatgtctggtggcatcggtaatcaatatgcagtagacccaacgtcatacttacaaagtagataatacagtaaatcccaagttacgatatcatacgcaacttgggattttttcgttttaataataggtataagcccattgcttgtcctctaaaacatgttgataaaaaggatcttggccaattaacttgatatcatctgcaagtgcttcaacttcatctaaatgatgggtagttaatataattaaacatttagatttcataatgttaagtagttggtggatgtcatgtctagatttcaaatcaataccaactgtcggttcatctaaaatgagaattcgaggttgacctagtaaacctactaatatattaattttacgtttatttccaccggacaatgtagatactttggcagacgtatcattaaagtttaattgctgtaaatattcgttgatagttgtatcgttaattgaatttttacaaagtgatttaaaaaatttaatgttttcagccactgtcatgtgttcaaataacgcaatgtcttgtggcacataaccgatgtgattttgtatttgtctttgattccatttttcgccgaaatagttgatagttccatcattagctttttcaataccagcaatcatacgaagtaatgttgattttccagcgccattatcaccaagtaatacggttaaacgattactatcaaaggacatggttaaatgattgaaaatctgtttgttacggtaacgctttgaaaggttattaatttctatcatcagttacactcctttacatgaaaatggtcaagtatacgatacccatagcaagtgcatatataaatgtcatgaataatcgatgacttattgtttgaatatggaataagataaagacgatacctatctcataaatcaatataagtaacagtgattttaagtaaaatatcaagctgagtggttgagacaaatatagactaactgccaatagtaccaacaataacaagatcgtatgtgtcattacataagtactatatagtttgaaacggcttaaatgatattgtgataatcgttgcaatgctgcttgttggtttaaacgataatgaagtactacttgaacagcgctaacaaataaaatcaccgcaaagattaagctaattgaaatagagtgttgtgcttgtttagtaagcgacacaaatttgattttagattcaggtgtatgtttatgataggacttgttgatagcatcgatggattgatgctgtttcatatcctcaaggtgttcataaataatgttaggaatttgctgttcatataatgagctactgacaatttctacagcaataccacctataaagtcatctctaccatataactgtatcgtttcttttaaacggttctcttttaatttttgagagaaacctttaggaatttgcatacttaaaatagcttcctttttagtaacatcatcttcaatatagctttcatcttcatcgacttttttaatagttacatagtcagattgtttaattttattgacgaatgattttgatgcagtggtttggtctaaatcttgaatggtaatcggtattttgaagttgtcatgtgctacacggtaacccataccaataagtacgagtgcggtgacaatggttgttacgagcaagatgtattgtaaccattgcttgaacacaacaagttgtatataaggcttcattgacgatacctccaaaccaatacagctaaattaattaacaaaagtgcgatgaagctaagatagaagctagggtgcagttctaaaatgtagttgtttaaaataatttctaacaattgatttgttacaactgcgaacggttgaatattgaaaacgccatttgctatatgttgtaaaaaaatcgtaggtattgttaaaccagataacaccaggatgacaatagctaatatgactttactaatactattcaacaagcctgttgttaaaagttcgatgattaataaccacagtattaaaaaggtaacataataacttaaatgaatggctaacgttggccaattatataattcaaaggtattcggaatactgaatataatccaaactacaccaacggtactccataacatagtataaaaccatgtaatcaacgcacgaatgattaataaacgctctttagaaaaatgaaacattttcaatcgcgctttcaatacagtatcttgattcattttcaaaactgtaaataaagatagtgcaaagatgaataccgttgctaaaaatcctgtaattgcataataactgcccgtatcgtataaatgaatcggttctaagttaaatgcacctgaacggtttaatcctgtaatcagcaaatcagtcataacattgatactgtcagaatgtgatgctttcggtgctaagtcttgaaaagctaagatgccacccattgatcgcataagacgttggtaaacagaatctgttagctgagatagcacgacacttttcatggattgttgatcatatgtatatactgaaattggtagttcgccttgtttataaaatgccttggtcatacctttatcaaaaacaaaatagccttgaagtttatgtttttttaacaaagtatgtgcttgcttatcatcatatgctttaatgcttacattttttcctaggttactccctttaccaatagagtttaagattaatttcgtttcacttgattgatctttatctacgacacctatattaaaatgattgtcatcttctgttacatgttggatcgtcgttaatgtaataaggagtgccgctaatataaatagtaaatagataatcaaataccactttttcaataaaaaagagtggtagatgcgaaacaaatgtattgttttcatttaaccactcctccaatgataagattgaaaggcaagatgaccttccaatcttatttttatattttagttatttagatgccttttttaaaattgattcaaacattttgccgccatttttttcgatttctttttcaagtttttcacggtcttttgaagatagactattgaaatctttcgcaccactatcatcaaaatcaatatctgctttcaattttgtgctagattttaaaatgaaattaattggttcttcagcatatttgatgccgatatttaacgtagatttctgagtgttattttttacgtcagaatctatattattttcaaaagtgaattcattttcgtcgctatatttatctaatgcgacagtgattttacctttatcttgacgttttgtgccatctactttttcttggttatctaatttgatttttgattcatcatattctgtctttttaccaaattcgtatttatcattatatttattatctttttctttagaagatacgcctttaattgtatatttcgcttcagcatacgtgtatttatcttgatcgaaatcaagtgcgtaatctagttttaacttatcgtcttctaaagtattagtacctttgattttagttttgttattttctttgtctgtaatagtaatttctcgttttacaatcgtatgtttttcggtataaattttagattgaattttagcaaattcatcctttttagtttctttgacatcgtcaattgcttttttgatgtctttttcaaagtcttttgtagcaccttgttcttccattaattttttaaggtctttatcctttttagcttcttctaatacagctaatgtaatttttttagtgtcagctctgctaagtgttaacgtgacaggtctaactttgtacttttcaccattaaccttaatttcttcttttttacctttatcaaaattatcgtcatctaatttgtcgacaataagttcggaatatttttcggcaattttgctgtagtcactttgttgtgcttgagcattactaaaaagagtatttaaatttagttgttggtttgtaataccattttcttttgctgtttcttcatcttcacctgtaagttttgaataagttgataataaatcagaattattaacactatatttccctttaaataatggtgattcgaaataatgcttatctttatctgcagctaactggaatttccctaatgcagagtctgctattgttggttcaagattaatcattgatttctcttttttaggatcatgtccatatgacattttaattttcgaagcattaacaacagatttaggaataccaagccccttaacaatttcatctgatgcatctgcgcttaattctaatgaagataaaaatgaattatctttcatcttttcttggaacttcacttcattttcaaaacggtcattaaaataatctttatacatttttgctgtttgttgttcactttttaggtatgtatttttcggtgtattagcaaaaaatgcataaactccccatgcgattccacctattaataataagacaacaataataggaattataatttttagttttttagacattttgtttcctcccaattatttatgagttaatcatatcagaacaatacattttattaaatggtttattttaaattttgtttaaattaataggattttagttataataatgtttaataagttattggaaatctaataaactacaaaaaatattttgattacataatgattatttaaaaatgtcggttaactttaaggtgacaagttattgcaattttgaaggtagacatcatattttataatcgaataacatacaaaataaagcgaccaattttgcagtgttacgaattgtaaactgcgaactggtcgctttttattgatgtgatgattaatttaatggatgtaattatatgatgaaacttctgaagcagagatggttcttgatgaaacgatatattcaccaatccaattcatttctgaaattagaatacttccatcaatattaactttttcaacgtaggctacatgaccaaatggaccatttactgtttgtaaaattgatcctcgtgttgggtgtctatctactttgaagccattgcttgaagcttggcctgcccagtttttagcatctccccaaaatgtactaatcgtgtgtccatctttggcacgtttatcaaagacataccatgtacattgtccagcagtatataagttgttcttacttgtgataagaggctgatcaatgattttaccgttacctaatgctaaaggtttaccgtcagcagtctttgctttgtcattaaattcggcgatttgtaattcgtcatacaattcgtctaaatcgatgcctgtaataagccctttgttatcttttgaaaaagcgttatttaattcatcgtcattgtcttcgacattcggtattgctggtgtcaaaggattgcttggtgacgtttgaggcggtgtgtgtgaatcaattgcgtcattaatgtgcgtatactgaccacttaatgaagaatggtactgattgttgttaagatcacgttgatttgcgtgttgatgattgtcggttgtacgtgactgattttgatgattgttgtttggcgcgttgtttttgtcataagtataagtatacgcgccggtgtctttattcactttgaactgtgcgtttgggtgtgctttctttgcttcttctaatgttttgctatcattcgtgtatgcttgagccgagttaggcgacatactaaataaagtaagagttgtcatcgtcagtaaaattgttttcttcataataaccatttaatcctttatgtatttaatttaattttagtatacacatttatattacaaaaatgaatggttaattaaaaatatatgggtatattcaatatatttatttaaaaaaagctaaaaatacttaaaaaactatatacatatactaataatttatatattatttgagtaaggagcactttttcaaaaaatagtgtccctaaaaagttttgataaacttaaaatattcaggaggtttctagttatggcaatgattaagatgagtccagaggaaatcagagcaaaatcgcaatcttacgggcaaggttcagaccaaatccgtcaaattttatctgatttaacacgtgcacaaggtgaaattgcagcgaactgggaaggtcaagctttcagccgtttcgaagagcaattccaacaacttagtcctaaagtagaaaaatttgcacaattattagaagaaattaaacaacaattgaatagcactgctgatgccgttcaagagcaagaccaacaactttctaataatttcggtttgcaataagcattctgaaattggcaaagtcacattttctaatgtggctttgcttatcattttttaagaaaacaactgaaaggaaataagcatgaaaaagaaaaattggatttatgcattaattgtcactttaattattataattgccatagttagtatgatattttttgttcaaacaaaatatggagatcaatcagaaaaaggatcccaaagtgtaagtaataaaaataataaaatacatatcgcaattgttaacgaggatcaaccaacgacatataacggtaaaaaggttgagctgggtcaagcttttattaaaaggttagcaaatgagaaaaactataaatttgaaacagtaacaagaaacgttgctgagtctggtttgaaaaatggcggataccaagtcatgattgttatcccagaaaacttttcaaaattggcaatgcaattagacgctaaaacaccatcgaaaatatcactacagtataaaacagctgtaggacaaaaagaagaagtagctaaaaacacagaaaaagttgtaagtaatgtacttaacgactttaacaaaaacttagtcgaaatttatttaacaagcatcattgataatttacataatgcacaaaaaaatgttggcgctattatgacgcgtgaacatggtgtgaatagtaaattctcgaattacttattaaatccaattaacgacttcccggaattatttacagatacgcttgtaaattcgatttctgcaaacaaatatattacaaaatggttccaaacatacaataaatcattattgagtgcgaattcagatacgttcagagtgaacacagattataatgtttcgactttaattgaaaaacaaaattcattatttgacgagcacaatacagcgatggataaaatgttacaagattataaatcgcaaaaagatagcgtggaacttgataactatatcaatgcattaaaacagatggacagccaaattgatcaacaatcaagtatgcaagatacaggtaaagaagaatataaacaaactgttaaagaaaacttagataaattaagagaaattattcaatcacaagagtcaccattttcaaaaggtatgattgaagactatcgtaagcaattaacagaatcactgcaagatgagcttgcaaataacaaagacttacaagatgcgctaaatagcattaaaatgaacaatgctcaattcgctgaaaacttagagaaacaacttcatgatgatattgtcaaagaacctgatacagatacaacatttatctataacatgtctaaacaagactttatagctgcaggtttaaatgaggatgaagctaataaatacgaagcaattgtcaaagaagcaaaacgttataaaaacgaatataatttgaaaaaaccgttagcagaacacattaatttaacagattacgataaccaagttgcgcaagacacaagtagtttgattaatgatggtgtgaaagtgcaacgtactgaaacgattaaaagtaatgatattaatcaattaactgttgcaacagatcctcattttaattttgaaggcgacattaaaattaatggtaaaaaatatgacattaaggatcaaagtgttcaactcgatacatctaacaaggaatataaagttgaagtcaatggcgttgctaaattgaaaaaggatgctgagaaagatttcttaaaagataaaacaatgcatttacaattgttatttggacaagcaaatcgtcaagatgaaccaaatgataagaaaacaacgagtgttgtggatgtaacattgaatcataaccttgatggtcgcttatcgaaagatgcattaagccagcaattgagtgcattatctaggtttgatgcacattataaaatgtacacagatacaaaaggcagagaagataaaccattcgacaacaaacgtttaattgatatgatggttgaccaagttatcaatgacatggaaagtttcaaagacgataaagtagctgtgttacatcaaattgattcaatggaagaaaactcagacaaactgattgatgacattttaaataacaaaaagaatacaacaaaaaataaagaagatatttctaagttgattgatcagttagaaaacgttaaaaagacatttgctgaagagccacaagaaccaaaaattgataaaggcaaaaatgatgaatttaatacgatgtcttcaaatttagataaagaaattagtagaatttctgaaaagagtacacaattgctatcagatacacaagaatcaaaaacaattgcagattcagttagtggacaattaaatcaattagataataatgtgaataaactacatgcgacaggtcgagcattaggcgtaagagcgaatgatttgaaccgtcaaatggctaaaaacgataaagataatgagttgttcgctaaagagtttaaaaaagtattacaaaattctaaagatggcgacagacaaaaccaagcattaaaagcatttatgagtaatccggttcaaaagaaaaacttagaaaatgttttagctaataatggtaatacagacgtgatttcaccgacattattcgtattattgatgtatttactatcaatgattacagcatatattttctatagttatgaacgtgccaaaggacaaatgaatttcattaaagatgattatagtagtaaaaaccatctttggaataatgtcattacgtcaggtgttattgttacaactggtttggtagaaggattaattgtcggtttaattgcaatgaataagttccatgtattagctggctatagagcgaaattcatcttaatggtgattttaactatgatggtcttcgtacttattaatacgtatttactaagacaggtaaaatctatcggtatgttcttaatgattgctgcattgggtctatactttgtagctatgaataatttgaaagcggctggacaaggtgtgactaataaaatttcaccattgtcttatatcgataacatgttcttcaattatttaaatgcagagcatcctataggcttggcactagtaatattaacagtacttgtgattattggctttgtactgaacatgtttataaaacactttaagaaagagagattaatctaatgttgatgaatagcgtgattgctttaacttttttaacagcatctagcaataatggcggacttaatattgatgtgcaacatgaagaggaaaagcgaatcaataatgatttaaatcaatatgatacaacgctatttaataaagatagtaaagaagtcaacgacgcgattgctaagcagaaaaaagaacgacaacaacaaataaaaaatgatatgtttcaaaatcaagcgagtcactcgactcgcttgaatgaaactaaaaaagtgttattttccaaatctaacttagaaaagacttcggagagtgataaaagcccctatattcaaaacaagcaggagaaaaaaatattcccgtacattttgatgtctgtaggggcttttttgactttaggatttgtcattttttcaattcataaagggagacgaacgaaaaatgaatcagcacgtaaaagtaacatttgattttactaattataattacggcacatatgacttagcagtaccagcatatttaccgataaaaaatttaatagctttagtattggatagtttggacatttcaatatttgatgtcaatacacaaattaaagtgatgacgaaaggtcaattacttgttgaaaatgatcgactcattgattatcaaatcgctgatggagatattttgaagttactataggaggaaaaatagatggttaaaaatcataaccctaaaaatgaaatgcaagatatgttaacacctttagatgccgaagaagcagctaaaacaaaattacgtttagatatgagagagattcctaagtcttcaattaaaccagaacattttcatttaatgtacttattagaacaacattctccatattttatagatgctgaattaactgaactacgtgacagtttccaaatacattatgacattaatgacaatcatacaccttttgataatattaaatcatttactaaaaatgaaaaattacgttacttactcaatatcaaaaatttagaagaagtaaatcgtacacgctacacatttgtgttggcaccagatgaattatttttcacaagagatggattaccaattgctaaaacaagaggtttacaaaatgttgttgatccattaccggtgtcagaagctgaatttttaacaagatataaagcactggttatctgtgcattcaatgagaaacaatcatttgatgctttagttgaaggaaacttagaactacataaaggaacgccatttgaaactaaagttattgaagctgcaacgttagatttactaacggcatttttagatgaacagtatcagaaacaagaacaagattatagtcaaaattatgcatatgtacgcaaagtaggacataccgttttcaaatgggttgctatcggtatgacaacgttaagtgtgttattaattgcattcttagcctttttatatttttcagtaatgaagcataatgagcgcattgaaaaaggataccaagcatttgtgaaggaagattatacgcaagtactaaatacgtatgatgatttagatggaaaaaaattagataaagaagcgctttacatttatgccaaaagctatattcaaacaaataaacaaggtttagaaaaagataagaaagaaaacttgcttaataacgtgacaccaaattcaaacaaagactacttattatattggatggaattaggacaaggacatcttgatgaagcgattaatatagccacttatttagatgataacgatattacaaagttagcgttgattaataaattaaatgagattaaaaataacggagatttatcgaatgataaacgttctgaagaaacgaaaaagtataacgataaattgcaagatattttagacaaagaaaaacaagttaaagatgaaaaagcgaaatctgaagaagagaaagcaaaagcaaaagatgagaaattaaagcaacaagaagagaacgaaaagaaacaaaaagaacaagcacaaaaagataaagaaaaacgtcaagaagctgaaagaaaaaaatagtataggactgaggcaaagacaatgcataaattgattataaaatataacaaacaattgaagatgctcaatttgcgagatggtaagacatatactattagcgaagacgagcgtgcagatattacgttgaaatcgttaggcgaagtcattcatttagaacaaaataatcaaggtacttggcaagcgaatcatacttctattaataaggtgcttgttagaaaaggtgaccttgatgacattacattacaactttatacagaagctgattatgcatcatttgcttatccttcaattcaagatacgatgacaattgggccaaatgcgtatgatgatatggttattcaaagcttgatgaatgccatcattattaaagattttcaatcaatacaagaatcacaatacgtacgcattgtgcacgataaaaatacagatgtgtatattaactatgaactacaagagcaattaacgaacaaagcttacattggtgatcatatttatgttgaagggatatggctcgaagtacaagctgatggtttaaatgtattgagtcagaatacagtggcatcgtcattaattcgcttaacacaagagatgccacatgcacaggcagatgattacaatacgtaccatcgttcgccaaggattattcaccgtgaaccgaccgatgatattaagattgaaagaccgccacagccaatacagaagaacaatacggtgatatggcgttccattataccgccattagtgatgattgctttaactgttgtcatctttttagtgagaccaattggtatttatattttaatgatgattggtatgagtacagtaacgatagtatttggtattacaacgtatttctctgaaaagaaaaagtataacaaagatgttgaaaaacgagagaaagattacaaagcttatttggataataaatctaaagaaattaataaagcgattaaagcacaacgttttagtttgaattaccattatccaacggttgctgaaattaaagatatcgttgaaacgaaagcaccaagaatatatgaaaaaacatcgcatcatcacgatttcttacattataagttaggtattgcgaatgtagaaaagtcattcaaattagattaccaagaagaagaatttaaccaacgtcgtgatgaactattcgacgatgctaaagaattgtatgaattttacacagatgtagaacaagcaccattaatcaatgatttaaatcatggaccaattgcatatattggtgcacgacatctcattttagaagaattggagaaaatgctaatccaattgtcaacgttccatagttatcatgatttagagtttctatttgtgacacgtgaagatgaagttgaaacattgaaatgggcacgttggttgccacatatgacattgagagggcaaaacattagaggatttgtttacaatcaacgaacgcgtgaccaaattttaacgtcaatttatagcatgattaaagaacgtatccaagctgtgcgtgaacgcagcagaagtaatgagcaaattattttcacaccgcaattagtgtttgtcattacagatatgtcattaattattgatcatgtcattttagaatatgtaaaccaagatttatcagaatatggtatttcattaatctttgttgaagatgtgattgaaagtttgccagagcatgtagataccattattgatatcaagtctcgtactgaaggcgaactgattacgaaagaaaaagaattagttcaattgaaatttacacctgaaaatattgataacgtcgataaagaatatatcgcgcgacgtttggcgaatttgatacacgtcgaacatttgaaaaatgcaattcctgatagtattacatttttagagatgtataacgtgaaagaagtagatcagcttgatgtagttaatcgatggagacaaaacgaaacatacaaaacgatggcagtacctttaggtgtaagaggtaaagatgatattttatcattgaacttacatgaaaaagcacacgggccacatggtttagttgctggtaccactggttcagggaaatctgagattatccaatcatacattttatctttagctattaattttcaccctcatgaagttgcattcctattgattgactataaaggtgggggtatggcgaacttatttaaagatttagtccatttagttggtacgattacaaacttagatggtgatgaagcgatgcgtgccttaacatcaatcaaagccgaattgagaaaacgtcaacgtttattcggagagcatgacgttaaccatattaatcaataccataagttatttaaagaaggtgttgcgacagaaccaatgccacatttattcattatttccgatgagtttgccgaattaaaatcagaacaacctgattttatgaaagaacttgtatcaacggcacgtattggacgttcgttaggtattcatttaatacttgcgacacaaaaaccatcgggtgttgttgatgaccaaatttggtctaactctaaatttaaattggcattaaaagtacaagatagacaagacagtaatgaaattttaaaaacaccagatgcagcagacattacattaccaggtcgtgcgtatttacaagttggtaataatgaaatttatgaattgttccaatctgcatggagtggtgcaacatatgacatcgaaggcgataaattagaagttgaagataagacgatttacatgattaatgactatggtcaacttcaagcaatcaacaaagacttgagtggacttgaagatgaagaaacaaaagaaaatcaaactgagttagaagcggttatcgatcatatcgaatctattacaacacgattagaaattgaagaagttaagcgaccatggctaccaccattgccagaaaatgtatatcaagaagatttggtagaaacagatttcagaaaattatggtcagatgatgcaaaagaagtggaattaacattaggacttaaagacgtaccagaagaacaatatcaaggaccgatggtattgcaattgaaaaaagctgggcacatcgcgttaatcggaagtccaggatatggtagaacaacgttcttacacaacattattttcgatgttgcaagacaccatcgtcctgatcaagcacatatgtacttgttcgatttcggtaccaatggtttgatgccagtcacagacataccacatgtcgctgattactttacagtagatcaagaagacaagattgctaaggcgatacgtaagatacatgatattatttctgaacgaaaaagactattaagtcaagagagagtagttaatatagagcaatataataaagaaactggaaattcaattccaaatgttttcttaattatcgataactacgacacggtgaaagaatcaccatttatggaagaatatgaagaaatgatgtctaaggtgacacgtgaaggtttagcattaggggtatacatcgttctttcaggatcaagatcaagtgcaataaaatcagctatatttactaacattaaaacaagagttgcgctgtacctctttgaaaataatgaattaacaaatattattggttcttataaaaaaggtgtgaaagatgttaaaggtagagctgcaataaatgatgataacttcacacagttccaaattgcgcaaccatttgaattagcagaaggacaaacatataacgagcgcattaaaaatgaagtagcacaaatgaaagaattctatgtaggagattatccaaaacatatcccaatgatgccagataaggtattaatggaggatatacaagaaacatatgatttggaaaaaatcattcatgaagaacacaaattaccattaggattagactttgaggatgtggaactagttagcttagatctgacattaccaagtatattaacagcaagaacaccaaatgatttagaaatagttaataatcgagttttagatggtatgagtaaacttaaggaaagtgtaacaacaatactagttgatgcagatgaaaatatgagtgataaggcaagtatagttaattcatattatgcatcgtcagaggatttgcaattaataaaacaaggttttatcgttgaaatcaaaaaaaggttgaatagcgaacgaagtaaagaaagtgtgaagattgtatttatcaacaatcttaaggcgtttatttctatcacaggacttaatgaaaaggatataaggtatatattatctgaaggaccaaaggtaaatgtctatacaataattagtagtatgtacaatgacatcttaggaacatttgatagagaatcaaaattagcacgtcaaattattaatcaagcagtaattgtaactaggctatatgatcaagagtttttacaagctaaaatcacgaatagagagccgttattaaaaccatatgaaatgtattattttaataaaaatgaacatattaaaataaaattaattcaatagggaggacaattatgggggaaataaaagttgaaacgagtagtacgataggaaaaattgaaagtatttctaatgctggatcaaatgtttcttttgataatgtatcagactcgttagaatacacaaacatttcaccatttacaggatttgctgctgctagtagtactttaactacagctatttctaattatcattctattatcactcaagacacagaagcaatgaaaactgctgtaaatgattttagagataaggatgctgatatagctggacaaattgatggaaataataatttaggagcaggattataacatagagggagataaaaatgactaataaggaagagctcaaaaaaagaaaggcacgatgtatagaacaaaaacatagcaaggaaagtgaattgaaaagcttacaaggagataagaaaaggctgcaagatgcagtgaattctgcacagaccataatagaagatttcaactctgaaaagaagacttatgatggtatagaaattgaaaagaatcaatggtctggacaaacacgtaacaaatcggatgataatcgcaccaatttaaatacgtcaatagataaatataaagaaaagtttgataaggccttaaatcaaatgaagaaggatttggaaaatcttgaaagtaaaatagaaggcgttgaaacggatatttcaaacattgctgctgaaattcaaaatatagacagtcaattataaatataaaagagtaaaggagtataaaatggggaataaaataaaaatgtcagaagtgaataattttaatgcttcattacagaaatctctcagtagcttatcgaccaacacaaaaaccttaaagaataatattaataaattgaaagatgatagtgaatttaaagggaagacagcatcgaatattaatagttataatcaaagttttcatattgaaacaataagtagaatcgaaaaaataaaggaggaatttgaaaaaaaattaaaagatgcaattgaagattttcaaaatagtgttgataatgaccataatgcaattttagatgaagatgcaatagaaaaatacaaaggggaagtcaaaaaatctattgaacaaatagagagtattaagacaagaatgaattctactataggaggggttcatgatttaacaacagcaaaaacaataagtggtaaggatgttaaagaaaagggagaaacatttaataagcaaattactgatacattagataattttaataattttcaaagtttacactttttagatgattccgaattattatctatgattacacctgtttctacaatggcctctaaagttaaaaatatgccaagtaatcgatcaactatatctggaaatgctggatatataaaaagtgagtataaacttcattcagaaaacaaccaatttcgtgaattgaaaaaagaattggaaaaatatgaaagcgcaatatatggtggtaataaatatcgaaagactgttaaatctatgattgaaataaaaaatgcattaattgttgcatatatagctggtgacggtaatatctttaaaggtaatgaattattagctaaaaaccagttggggaaattgggaaataaaaaattaaaattaataaatgcaactatgcaaacaaatgttgaaaatattgaaggaaaaagattagttaaagctgctaaatttatacttgataaaaataataaaatgaaattcagtgagaaattaaaagctggttttaaaatgaccagaaattatagcgatactgaattcaagcagctagaaaaagttgcaggaagatacaatggtaaatctgcaatgaaaagaggtgctaaagccgcatgggaaagtatgagtcaaaaacagttacgcgaatttttgaaaaatcctaaaaatttaaaaaatatatgtttggatgaagttaaggattttctaggcaaaaacaaactaggaaaatttttgaaaagtatgagatatgctggtaagcttttaggaccactaggagcagtagcagcagtagcaaataatgttgtaaatgaaaaatcaggacagaaaaaaattgttggatctattgttgatttaggggcaattggtggttcagctgcaactggtacggcaatcggtgctggaattggaggaccttttggtgcagcaataggtgctgcaattggaacaatggtaggtatttcaacagacattaagattgttggtggcaagtcattgactgatcttgctaaagataaacttaataatacggttagttctattagaagtaatggttttggtaaaacgttaagcaatgtattttaaaaggagatttaaaatgaataatactaaggaaaatattgatactcttcgaaaaccaggtgcacaagcattgagtttagcatcattatttatgatacttttttcatgtctaactttcttttatggattagattatgaaaggtttccaaattatttaaagataacgacaattatagaattaataattatcataattagtttacttcaatggattagatttatagatttcgaaaaggaaagcgcacagaaatataaaaaaatatatgcccgatttttagttgttataaatgtgctaactactatcaccgcagtatttgcaacatgtaatctttactattttgttgctgtacaaaatcattatgacctattcaattattggttgatgggtacgatttcaatcataattagttatttattattagtaattggcggaatgttcacgttattaaaattacctaaagtaacaaaacgatggggtggtaaaactaaaacacattttggtttattattaactgcgttgagcgcatttatatatattgaaagaattatcgaatatatattagttcctaatgtcgtagaatcgaagtttgtcataatggtaagtatcattattattgcttgtacacaatttgtggcatttcaatttattatgcaatacagtagattctatatttttgaattaaacacagcagatgatgactaaatgatatagatttacaaaacacacttttaaaaagtgaattgatctgaaaaagtgatttgaaaatcggaaattctatatagtttttcactgcttttatattttaaattggaggaataataaatggaacttgatgcattagtaatgcctaacttagctaaaatggaattttctattaatccagaatattggaaagacgaaatgagcagaattaaatcattttttatagacaaacgtatctatacagttggaccaatagtatttacacgagaagttgtcgggctagatgaaatgaagtttgtaacctatatttcattaaattctgaaattgacgatatacctgaattgaatattaaatttataccttcaattgcccttttaccaactatttctcataaatgctttgatgaagatgaatttgaaaatgtttatatgaaaatcaaagagtttgcagtagaaaataacataacgctatcaaattctccattctaccatgttatggttgattattttggtggtcaagtatatgaaattcacgctgaaatcaatttagatgaggatgaattggaatgaatgaattaagctattctactataatgtttagaaatgttatatcaaaagaatatttagatatagacttaaaaaatttaaatgaagtgacaacacattttttaaatgaagtaaagcattatgatttaaatgaaaatggaccattaattctcactattaaccagttgatgaaaaatgagaaagtaaatattacaatttattcatctattaataatataagtagtttacatgattcttttgaatttcaatcttacctttatattgatcaaatgttacataatcaacttagaccactaaattatgaagaagatattaagaagggtttagaagatatagaaagatttgcaaaagaaaatcaacttcaacgtatatcaccatattattttatactcaatgatgtgaatggatttaaatggatcgatattaaagtaaaagttatggaatattgaggtgcgaatatggagttcttattattaattgtcgtagccggactgtattatattatatatttaactgctgtgatgtattctgaaaaaatagtagtattgcctataatcatctatgccattgtgtttgtagtaattggtatcacttatatttttataggtgacagctatgatcagttaacaaatttcaatgtgattttgtatatggggagtttgttttatgcatggatggcttttagaaatctttggaacagaccattattattaaaatataagaacattacagatagttcaagtggaatagttaataaatctgaatataattcagttgaaagcttacgtataaacattgaaatagctaagtataaagggattatttctttgatagtagctatagtactaacggtattaatgacattaaagtcaacacctcaaatcactgcagaaacacgtgacttaagtatctcatttttcatactcagcttatttatcattataatatttgcagtttgggatttgattattagagttagaaagggaacgtttgcttttgttgtaataaggccaatattatttagttgctggttatttattttgaatatgattttatcaagattattataatataagaagttgaataaattgtaatgtgaaaaatcattgagaatttcaattattgtaacaatagtttcagttattttagtttcattagtttatttaggtttaaaatgagtaatattattttgaagaagcattaatccacgtagaagtgttgtttaatgctttttatttaacggtaatgaaaatatagggggataacatgactttcgaagaaaaactaagtcaaatgtacaacgagattgcgaatgagatcaatggaatgataccagtagactgggaaaaggtatatgcaatggcatatatagatgatggaggaggagaagtgttctactattacacagaacctggaaggaatgaattatactactatactagtgtattaaataaatatgatatatcagaatcagaatttatggactcagagtatgagttgtataaacaatttcaaaagttaagaaatatatttaaagaagaaggacatgaaccatggacatcatgcgaatttgattttacaagagaaggtaaattaaaagtttcatttgattatatagattggataaattcagaatttggtcaaataggtcgacaaaattactataagtatagaaaatttggaattttaccagaaacggaatatgaaattaataaagttaaagaaatcgagcaatatgttaaagaacaagaagaagctgaaatataggggagataacatgaatttcgaagaaaaactaagtcaaaagtacaacgagattgcgaataaaattagtagcatgataccagtagagtgggaaaaggtatatgcaatggcttatataaatgaaagaaatggagaagttttctacaattatactgagccaagcagtgatgaattgttttactatacgagcgtgttaaataaatataatataccaagatcagaatttatggactcagtatatgaattatataagcaatttgataatttaagagaattgtttatagaagaaggactcgagccatggacatcatgcgaatttgactttacaagagagggtaaattaaacgtatcttttgattatattgattggactaaattagaatttggtcaaatagcaaaagaaaattattatatgtataaaaaatttggagttatgccagaaatgaaatatgaaattaataaagttaaagaagtagagaagtgtattaaagagcaagaagaatagactatcttcatgtgagactaaacaataaagctttgtttagtcttttttggcggttaagtaaaaagcaatagataccgtaaagttgatgctcatcaaataataatataaagataattttaggtttttaaacttttaatcgaaaagaatctaagtatttagctttaaatacgtaatatgctatttaaaaaataatgtataggagatagatatgactactaaggaaaatatagacattcttcgaaagccaggtgcacaagccttaagtttaatatcattgtttttgatacttttttcatgtctgactttcttttttggtttagattatgaaagttttcctaattatttaaagataacgacaattatagaattaataattattgtaattagtttacttcaatggattagatttatagatttcgaaaaagaaagtgcacagaaatataaaaaaatatatgttcgatttttagttattataaatgtgttaactactatcactgtagtatttgcactgtgtaacctttattattttgcagctgtacaaaaccattatgatttattcaattattggttaatgggtacgatttcaatcataattagctatttattattagtaattggcggaatgtttacgttgttaaaattacctaaagtaacaaaacgttggggtggtaaaactaaaacacatttcggtttattattaactgcgttgagctcatttatatatattgaaaaaattatcgaatatatattgattcctaatgtcgtagaatccaagtttataattattgtaagcatgttggttatcgctggagcacaatttgtggcatttcaatttattatgcaatacagtagattctatatttttgaattaaacactgaagatgatgactaaatgattttgtaaattactattggagtatacttatataaaaaatcaacttcaacgtatatcaccatattattttatactcaatgatgtgaaagaatttgagtggattgatattaatgggatttgatttttagaattagaaaaggaacgcttgcttttgttgtaataaggccaatagttttcagttgtcggttattattctgaatatgattttatcaatattattataattgtattacatatagttgtcggtaaatttttatttacgaaatggtaaaaaagtatatactattaatatcttttttactataattataaatagttaaataaattgaaagacaaaataatgagtaggagttaatgagatggaaaaccaaaaacaaggcaatggcttaaaaattgcaacatgggtatttattgtattaacagtagttacaccgctatttggtattggaagtattgtttgtagtattaattacaaaaaatacgatgctgaaaaaggttcgaagttattgaaaattgcaattatcgtaacaataattgtttttgttttaaatttattagcatatttaggtttaagataagtaaaatgaatttgaaaaagcattaagcgacatttgtttgttgtttagtgctttttatttaacggaaatgaaactaatatctattttgaaaatataggggcgataacatgactttcgaagagaaattaagtgaaatgtataacgagattgcgaatgagatcagtgggatgataccagtagaatgggagcaagtatttacaatagcctatgtaactgatcaagctggagaagtcatttttaattatactaaactggtagtgatgaattaaattattattcagatatacctaaagattgcaatgtctcaaaagatatttttaagaattcatggtttaaagtttatcgaatgtttgatgagttaagagaaacttttaaaaaagagggtcttgaaccatggacatcatgcgaattcgattttacaagagagggtaaattaaacgtatcttttgattatatagattggattaaattaggttttggtccatcaggaaaggaaaactactatatgtataaaaagtttggtgttttaccagaaacggaatatgaaattaataaagttaaagaagtagagaagtatgttaaagagcaagagtagcagacatgttataaaaggctgtgtaaaaccaacctcgttatacatttgactcaaagaagaaggtaaaagataagattatttgcaacttaaaaagtcaattagtttatcggtatccatacatcatggataaatgagttcaactaattaacaaattacgatataaatttaaaattgtcattaattgaaaaggttattgtagtgtattttataaatttgatgtacatcgacttattttttaaaacttatatcaaaaaaatatgagaaaagtatatactattaaaatgttttttactataattataaatagttaaatatttggttatgaaataaatgtgtggtaggcaatttttagagatacatagcaatgtaaaggtatcaaatagttattgcatcatttaatatgatggcataatcttcagtaaatagttgtaatttaacattgaaatagatgtttatattaaacagactttaatatcataattaatcaaaatcttgcgtcaaacatttaaacgaattttaagtttataacaattggttaaacattgttcaaacattacaatgataaagcatattatcagtattgtagtgtgtggaaaatgacagccatctgaggagaaaaatgatgaaaagaatattggtagtatttttaatgttagcaattgtattggcaggttgttctaataaaggtgaaaagtatcaaaaagatattgataaagtgtacaaagaacagaatcaaatgaataaaattgcctcgaaagtacaaaacactattaaaacagacattaaacaagaagacagtaatacacatgtttataaagatggtaaagtcattgttattggtattcaattgtataaagatcgtgaaaaaatgtattatttcgcatatgaaataaaagatggtaaggcagaaatcaatagagaaatagatccaattaagtatatgaaagaccataaagcagattatgaagatgaaaatgtagaagtggaaaaagattaacgtatgctttctttaaaacttttaaccagtttcgaaaagtaaatgagctttagcgacaataatttttaaaataaacacgatataaatttaaacatttatatataagaacacaaacgtaagtttgtaaataataataaaggagtaagacaatggaaaaatcgatcaaaataatgacaataataggaattgttgttcagggtttagcaacggtatttagtttactatttatggttttagcagcatcaggtgtaatgactacagatgtgtcaacaacagttaatggtgaggttgacccagttgatgcagaaacagcagcagcaattttcactgtattattcttattcctatttatatttggaatcatttcaattattttaggtgcaatcggtatgtttaaagcatctaaaaacaaaaaaatgagtggtatattgttgattattggagctgtaataagtggtaacataattacatttgctttatggttagtcagtggtattaaactacttactaataacaagcctaaagatgaaataagcgacttatcataaacatcgtatattgaaatttcaagatttcttaaccgattaaataaagtgctctcttagaagtagattttcagtcaataactgcttttaagagagcattttgtatttgataatgctcatagcatcggataaaaaccattgacgaactttaaaaaaatacgttagacaatgcacttctaaatattaaaggcatcgactaacgcattgttcaaatatagttaattatttttataaaattgatgatgatcattcaagtaagcatagaataaacctataatgagtccgcctccaatatagttaccgataaaagccgcagcgatattcgaaatagctggtatgaagtgcaatgtatcaacttgataaattaaaccacccataaataagcaactgttgtaaacgacgtgttcataacccataaaggcgaatatggtaacaccgaacatcatgacaaacatttttgcgagtacatcgtcaatttgcatggcaataactaatgaaatattgataaagaaattggcgaatatcgctttcattaatatacttacaaaaccagtagacaacgttttatgctctataactgctgataactgatttaacatatctggcgtcattacatttgaaaaacgcatgaaactaaataaaatggcagcacctaaaatatttcctgcaaagcacaataaaaatattttcaatactctagtcggtttaattactttataatacaggcctacagtaaagtacatgaagttactggttagtagttcggagtttgtaaataaaatgagtactaacgcaaagctgaatgtaatggcgctggccatattcactatacctggtggtaaatctggttcgtgtgttgctttaactgatagcacgaagacggtaataataccgataataaatcctgccatcatagcgcgtaataaataacgttttaaataaacgctttgtaatatatctttcgttcttatcgtttcgactacgttatttacccagtcgtccccataaaatattttatcccatttaatatgtttctccttcacaatgacatcctcacttttcatttgttaatcagagtatactatgaatcactttatttgtgaataatttcacaaaattaattttaaaaactaatatttttgaataacagctaggattttttaacaaatcatttattttaaaataattaatcgtcagttagtatcaatgaataaatacagattttcatgcaaaaaaacctagtaatgatgcgacgatcattactaggagattatgcgtctatttagttgtcgcttgtttcggacggcgtataactacatcgatgatgaaacctatgattgccaaaagaatgaatggtacaagccaagctaaatcgatatctgctaaaggtaacatcataaaccatttcaaaataacaccgtgtaataagttgaaactatttagtatttgtaaaattgaaataatcaatgtaataacagttgcgagtcgataggcccaactgaatctgaatgtgctaaacatgttagcaaatgatatcagtacaagtgcaatagacacgggatatattaatgtcaacaatggtacagcaatttttaaaatcatttctaaaccaagtgttgtaaataagaatcctatgatagagaaaataagtgcgaatattttataagaaaacttaggtacgtgtttcttagtaaatgtggcgcaagcattgacgagtcctatacatgttgttaaacatgcaagtatcactgtcataccaaatactatgttgccaaatgaaccaaatactcgtaatgagttgtacgtcaatatatctgtaccatctttaaagtttcctggagctgttgacgcacctacatatgccaacgcaaagtaaatcataccaagtaatatggctgcaataagacctgaaaagcagacatactttaatattttcatgcgatctgtgaggcctttaaacttatagccattgacaatgactacggaaaaagctaatgctgcaacgagatccattgtaaaatagccttccaaacttcctgcaatgaaaggatgtgttatatatttatccttaggtgcacttagtgcagattcagggttgaaaatgacagcaatacttaatagagcgaccattaatagtaataacggtgttaataattttcctaaatgatcaacgattttcgatggatttaaactaatccagtaaacgatagcaaaaaagattgctgcgaatataattaaagtccattggttgtgcacaggtaaaatgtgtcttgtaccaatttcgtacgcgacatttgcagcacgtggaataccgtaaaatgctccgatagacatgtaaatcacgacagcaaaaataaacccgaaccatggatgtatacgattgcctacactttcaacaccttcatcataaaatgcgacaacaataacagtaataaaggggagtaatatgcctgtaatggcaaagcctaacataccaatccacatattttgacctgctgtatggccaagcatgggcgggaatattaaatttccggctccaaaaaatagtgaaaataacatgaggcccgaaataataacttgttttttcaatgtaatttccttcctaaaactagatattcataataatttaaaaaatctgaaaaataaaaacgttcttactttatctttaaatgacaatactatgattctattattttataaaaaagattgcaataataacgtcttgctattattggataatgacaattaaagtgtcgtttttatgaattaaaataggtggaagtaagttggaaatacgttggagcgttgtgatttttatgagaaattgtaagagtgaggactgctatttataaaaggtaaactatggatgagtttatggttgttccaataggtaaataagagatagcacactgtacacataatgatacgtggatgagtgaatatgtctgataggaaggcttagtcactcaaatgaattaaagtttattacgtgataaatcacaaatctctctcatgtgataggtcgccaattaaatcatgcttatatgaaatgttcacatatttgttagcttttcaagaaataatattaaatatcttttcatagtatagcaatattaaataaatgcatttataattttaactgtattttaaatattaatcatgaggtgataagatgaataaaatttcaaagtatattgcaatagcatcattatcggtagcggttacagtttcggcaccacaaacgacaaattctacagcgtttgccaaaagttctgctgaagttcaacaaacgcaacaagcttcaatgccggcttcacaaaaagcgaatcttggtaatcaaaatattatggcagtggcttggtatcaaaattcagctgaagcaaaagcattatatttacaaggttataacagtgcaaagactcagttagataaagagattaaaaagaataagggtaaacataagttagctattgctttggatttagatgaaacagttttagataattctccatatcaaggctatgcatcaatacataataaacctttcccagaaggttggcatgaatgggtacaagctgctaaagctaaacctgtctatggcgcaaaagaattcttgaaatatgctgacaaaaaaggtgtcgatatctactatatttctgatagagataaagaaaaagatttaaaggcaacacaaaagaacttaaaacaacaaggtatccctcaagctaagaagagtcatattttactaaaaggtaaagatgataagagtaaagaatcacgcagacaaatagttcaaaaggatcataaacttgttatgctatttggagataatttattagactttacagatccaaaagaagctacagctgaatctcgtgaagcattaattgaaaaacataaagacgatttcggtaagaaatatatcattttccctaacccaatgtatggtagttgggaagctacaatttacaacaataactataaagcaagtgacaaagcaaaagataaattacgtaaaaatgctattaagcaattcgatcctaaaacaggcgaagttaaataatatatgaattggacgtctacatgtacttaaaggtatatgtaggcgtttttaaattgatccttaattttaaatgtaccgtacaaaaataatagacaattaattgcattttccataaatttgcttttaatataaaaagttcgggtataatgaaggataagtgtatgtataacattacagagcgcaacacgacgtacgtgcatctaagaatataaacaatgtttaaatcatagtagtagggagagaaatgcatgtttttagcttggaatgaaatacggcgcaacaaattgaagtttggactaattattggtgtgttaacgatgattagttacttgctatttttattatctggattggcgaatggtcttatcaatatgaataaagaaggcattgataagtggcaagcagatgccattgttctaaataaagatgccaatcaaactgtgcaacaatctgtttttaacaagaaagatattgaaaataaatacaagaagcaagctactttgaagcaaacaggggaaattgtgtctaatggccatcaaaaagacaatgttttagtgttcggtgttgaaaagtcatcatttttagttccgagtttaatagaagggcataaagcgactaaagataatgaagtgttagctgatgaaacgcttaaaaataaaggatttaaaattggcgacacattatcactatctcaatcagatgaaaaattgcatatcgtaggttttacagaaagtgcaaaatataatgcgtcaccagtcattttcacgaatgacgctaccattgccaaaatcaatcctagattgactggcgataaaattaatgcagttgttgtacgtgatacaaattggaaagacaaaaaattaaaccaagagcttgaagcggtaagtattaatgactttattgaaaatttaccaggttataaaccgcagaacttaacattaaactttatgatttcattcttatttgtcatttcagctacagttataggcattttcttatatgtcatgacattacaaaaaacaagtttatttggcatattaaaggctcaaggatttacgaatggctatttagcgaacgtagttatttcgcagacgctcatattagcattatttggtacggcatttggcttactgttaacaggcgttacaggtgcatttttacctgatgcagtacctgtcaaattcgatgtactaacattgctcgtatttgcaattgtgttaatgattgtctctgtattaggaagtttattctccattttaacaattagaaaaatagatccgttaaaggcgattgggtaggaggtgtagcaaatgttgaaatttgaaaatgtaacaaagtcatttaaagatgggaatcgtaacattgaagcggttaaagatacaaattttgagataaataaaggtgatattatagcattggttggaccttctggctctggtaaaagtacatttctaactatggcaggtgcattacaaacgccgacatctgggcacattttaatcaataaccaagatattacgacaatgaagcaaaaagcattggcaaaagttagaatgtctgagataggttttattttacaagctacaaatcttgtgccatttttaacggtaaagcaacaatttacattattgaaaaagaaaaataagaatgttatgtctaatgaagactatcagcaacttatgtcacaattaggtctaacttcattgcttaataagttaccttcagaaatttcaggtggtcagaaacaacgtgtggcgatagccaaagcgttatatacgaatccgtcgattattttagcggatgaacctaccgcggcgttagatactgaaaatgcgattgaagtcattaaaattctacgtgatcaagccaaacaaagaaagaaagcatgtattattgttacacatgatgaacgacttaaagcatattgtgatcgttcatatcatatgaaagatggcgtccttaatcttgaaaatgaaacagtagaatagttttattaagccggtacatcatgtgccggtatttttatgtttatgtattatttgaataaactttcacattcaattaataataattattatcgaaaattagaaatattccgtgaaatataatattttttgtagtaaaatggcctctaagtattcaatatttaaatatggggattgaatataaaattatcgtaatgggggtcaatggttatggatttattgataggtactttatttttatttttggtcttagtgatttttacattatttacatataaagcacctaatggtatgcgtgccatgggagcattagctaatgcagcaatcgcaacatttttagtagaagcatttaataaatatgttggtggcgaagtattcggtattaaatttttagaagagctaggagacgctgcgggaggtctaggtggtgtcgctgccgctggattaacagcattagctatcggtgtgtcaccagtatatgcattagtaattgcagccgcgtgcggtggtatggatttattaccaggtttctttgcgggttatatgattggatatgtgatgaaatatacagagaaatatgtgccggatggtgtcgacttaattggatcgattgtcatcttagcgccattagctcgtcttattgcagtattattaacgccagtagtgaatagtacattgattcgaattggtgatattatccaaagtagtacgaatacgaacccaattatcatgggtatcattttaggtggtattattacggttgtcggcacagcgccattgagttcaatggcattgacagcattattaggtttaacgggtgtacctatggctattggtgccatggcagcatttagttcggcatttatgaatgggacgctattccatcgcttaaaattaggtgatcgtaagtctacgattgcagtaagtattgaacctttatcacaagcagatattgtatcagccaatccaattccaatctatattacaaatttctttggtggtgcgattgctggtttaattattgctatgtcaggtttaattaacgatgcgacaggtacagctacaccgattgcaggatttttagttatgtttggatttaatcatccgacgacaattgtgatttatggtttagtaatggcgattgtaggtgcgcttgcaggttatcttggttcaattgtatttaaaaaatatccaattgttactaagcaagacatgattaatcgaggtgcagtagacgcatagcatcatcatattgaatagtaaaaacaaataaaacatagtaacgtgattcagtcgatgtaacagtcgataatgagtcacgtttttttatagaaaaatataagacataaaaatgtcataatttatagtcgacaaatatcatactgtataaacatttatcattttctcaggtgccttttacgcgatggaatgaacttactttttacgaaattatgcgtattttataaacaaatatcattgatataacggtaaatgtaagcgtttacaacagaaataactgcatgctacgatatttttgtaaattcactgattcaagtattttaagtcaatatgaggagggatgttatgagcgattctgagaaagaaattttaaaaagaattaaagataatccgtttatttcacaacgtgaacttgctgaggcaattggattatctagacccagcgtagcaaacattatttcaggattaatacaaaaggaatatgttatgggaaaggcatatgttttaaatgaagattatcctattgtttgtattggcgcagctaatgtagatcgtaagttttatgtgcataaaaatttagttgcagaaacatcaaatcctgtaacgtcaacacgctctattggtggcgtagcaagaaatattgctgagaacttaggtaggcttggcgaaacggtcgcttttttatctgctagtggacaagatagtgaatgggaaatgattaaacgattgtccacaccatttatgaatttggatcatgttcaacaatttgaaaatgcgagtacaggttcatatacagctttaattagtaaagaaggcgacatgacatatggcttagcagatatggaagtgtttgactacattacgcctgaatttttaattaagcgttcacacttattgaaaaaggctaagtgcattattgtcgatttgaatttaggcaaagaggcattaaacttcttatgtgcctataccacgaaacatcaaatcaaattagttatcaccacggtttcttctccaaaaatgaaaaatatgcctgattcattacatgctattgattggattatcacgaataaagatgaaacagaaacatacttaaatttaaaaatagaatctactgatgatttaaaaatagctgctaaacgctggaatgatttaggtgttaaaaatgttattgtgacaaatggcgtgaaagaactcatttatcgaagtggtgaggaagaaatcattaagtcagttatgccatcaaatagtgtgaaagatgttacaggtgcaggcgattcattctgtgctgcagtagtgtatagctggttaaatgggatgtctactgaagatatattaattgctggtatggttaacgcaaagaaaacgatagaaacgaaatatacagttaggcaaaacctagatcaacagcaactttatcacgatatggaggattataaaaatggcaaatttacaaaagtatattgagtattctcgagaagttcagcaagcacgggagaacaatcaaccgattgtagcattagaatcaacaattatttcgcatggtatgccgtacccacaaaatgttgaaatggcaacaacagtagagcaaattatcaggaataatggtgccattccagcaaccatagccattatagatggcaaaattaaaattggtttagaaagcgaagatttagaaatactggcaactagtaaagacgttgctaaagtgtctagaagggatttagcagaagttgttgcgatgaagtgtgttggtgctactactgtagcgacgacgatgatatgtgctgcaatggctggtattcaattttttgttacaggaggtattgggggcgtccataaaggtgcagaacatacgatggacatttcagcagacttagaagaactgtctaaaacaaatgtcactgttatctgtgcaggtgccaaatcaattttagacttacctaagacgatggagtatttagaaacaaaaggcgttccagttattggatatcaaacgaatgaattgccagcattcttcactcgcgaaagcggtgttaagttaacaagttcggttgaaacgccagaacgacttgctgacattcatttaacaaaacagcagttaaatcttgaaggtggcattgttgttgctaatccaattccatatgagcatgccttatcaaaagcatatattgaggcaatcataaatgaagctgttgttgaagccgaaaatcaaggtattaaaggtaaggacgccacaccgttcttgttagggaaaattgtagaaaaaacgaatggtaaaagtttagcagcaaatataaaacttgttgaaaacaatgcggcgttgggtgctaaaattgctgtcgctgttaataaattgttgtaggtgatgatacatgaatattttattcgctatcacagggatagcatttgcactatttgttgcgtttttattcagttttgatcgtaaaaacatagacttcaaaaaaacgttaataatgatatttattcaagtgttgattgtgttatttatgatgaatacaacgattggtttaacaatcttaactgcattaggttcattttttgaagggttaataaatgttagtaaagcaggtataaactttgtttttggagatatacaaaataaaaatggctttacattctttttaaatgtgttgctgccattagtgttcatttctgtattaataggcattcttaattatattaaggtattaccatttattatcaaatatgtaggtattgctattaataaaataacgagaatggggcgtttagaaagttactttgctatttcgacagcgatgtttggacagccagaagtgtatttaactataaaagatattataccaaagttgtctagagcaaaattatatacaattgcgacatctggtatgagtgctgttagtatggcaatgttgggttcatatatgcagatgattgagcctaagttcgtagttacagcagtaatgttaaatatttttagtgcgcttatcatcgccagtgtaatcaatccctataaatctgatgatactgatgttgaaattgataacttaacgaaatccacagaaactaaaacattgaatggaaaaacaggaaaacctaagaaagttgcctttttccaaatgattggggatagtgcaatggatgggtttaaaatcgctgttgtagtagccgtaatgttgttagcatttatttcattaatggaagcaattaatatcatgtttggtagtgttggtttgaactttaaacagcttattggctatgtgtttgcaccaatcgcattcttaatggggattccatggagcgaagctgttccagctggctctttaatggcgactaaactaattacaaatgagtttgtagcaatgcttgattttaaaaatgtcctgggggatgtatcagctcgaacacaaggtatcatttcagtttacttagtaagtttcgctaattttggtacggttggtatcatcgtaggttcaattaaaggcattagtgataaacaaggagaaaaagttgcatcctttgcaatgagactgttacttggttcaactctagcttcaatcatttcaggatcaatcattggcctagtattgtaaattaatcgaagtatctaaattaaatttatagcaacatcaaaaccccatcaccaagttggcgcaacagcgcatcataacttagtgacggggttttatcataacaatctactttttcgtagccgtttttgaaatgtatgttgatggtttatctttttcaaaaattgttaatcccgttatatcttttttatgttttggagggacaatgaagctaagtatataagcaaagacaaaagcaactgtaaatgaaatggtagatacatagaaaggtgagttacctttgccaacaccattatagacgtaagcaaagatgatacccaatattaatccacaaataacaccgaatgtattcgtacgtttagtgaaaataccaactgcaaatacaccagccaatggaacgccgaataatccagttacaaacaagaataaatcccataagtcatttgaattagaagcaattaagtatagtgacattccaaaaccgaaaatacctgcaatgatgatgaccaaacgagcaaagttaacttcgtgtcgctcgctaccttttccgaagaagcgttgcttaatgtcgattgaaatacaagcagatatagaatttaaactagatgaaatggtagactgtgcagctgcgaaaatggctgcaataagtaatcctgctacaaatggtggcatctcagtcaaaatgaaatatggcactacagatgatgtattgaagccttttggtaaaacagcttcatgtgcataaaatgaatacaacattgtacccataccataaaataagggtgctgaaattaaagctaggataccatttgtccataacgatttatttgtttcttttaaactatcagaagcttgataacgttgcacgacgtcttgactcgccgtgtattgatacaagttgttgaaaatatttcctaggaaaataattggaatggcagctgctgcagtatttagtttccagttgtctgcactaattaattttttatgctcaatcgcatctgcaaagacagtgccaaaaccgcctttaatgttcataacacctagaataatgataactaaagcgccgcctaataaaatgacgccttgaatgaaatcactccaaaccacaccttcgaatccacctaaaaatgtatataaaatacatagtaaaccaacgagtgatgcaacgatataagggttcatgtctgatacagatgtaatcgctaatgttggtaagtagataacgattgcaacacgccctagatgataaactacaaatagtaaagagccaatgacacgaatgctaggtccgaaacgtgcttctagatattcatatgcagatgttacctttaactttttaaagaatggaacatagaaataaatgagtaatggaataattgctacgatagcgatgttacctgcaatatatgaccaatctgttaaaaatgctttctctggtgtagacataaacgtaattgcacttaatgtagtggcataaattgaaaagccaactacccaagatggcaagcgaccacttgcggtaaagaaactattcgtactttgactcgcgcgcttagtaaaataaacgccaatgagtaacatagctagtagataaatgataacggcaacccagtttagtgtgccaaatccaacttctttcatgggcaacatcccctttacaatgtattgattctttgatgtctataaatcgtattttgcaatgagttgatctaatgtttgtcgatgtgcttcgttaaaaggtttgaatggacgtttcggtaatcctgcatcaatgccacggtgacgtagtatttctttcaatgttggataaatccccattgataacactgtttcgatgatgtcgtttgaatcatgttgtagttggtaagcttcttgaatttgaccttgtcttgctaagtcgaagatttttctagcgcgacgaccattaacgttatatgtagaaccaattgcaccatctacgccagaaatcgtagcttgaactaacatttcatcaaagccagatatgattaatttgtctgggaatgcttttctaatacgttcgagtaggaagaagttcggcgctgtatatttaacaccaacaattttttcgtgattaaaaagctcgctgaattgttcaatagaaatattcacacctgttaaatctggtattgcataaataatcatattgttctgtgttgcttcgataatatcgaaatagtaatctctaatttcttcaaaagtaaatggatagtagaatggtgttacggcagaaagtgcatcataaccgagttctgtggcatattttccaagttcaatggcttcatttaaatctaacgaacctacttgagcaatcaattttaccttatccccaactgcttctttggcaaccttgaaaacttgcttcttctgttctgtatttaataaaaagttttcgcctgagctaccatttacataaagaccgtctaattcttcagtttcaatggcattttgagcaatttgtttaagtccttgttcatttacttgaccattttcatcaaaaggaacgagtaacgctgcatataaaccttttaaatctttgttcattatgaagtccctccaaaaatcatttgataatatagtttacagctataattgtaaacgctatcataaaatgtaacaatatctttttgaaaattgtagtcatatttatgtataattaatgaaaatatttttcaaaatcaatagaaatggagtgagtaaggtgtattacatcgcaatcgatattggaggcactcaaattaaatcggcggttattgataagcaattaaatatgtttgactatcaacaaataccaacgccggacaacaaaagtgagcttattactgacaaagtatatgagattgtaacaggatatatgaagcaatatcatttgatccaacctgtcataggtatttcatcagcaggcgttgttgatgaacaaaaaggcgaaattgtatacgcagggccaaccattccgaattataaaggtactaattttaagcgattattaaaatccctgtctccttatgtcaaagtaaaaaatgatgtaaacgctgcattactaggcgaattgaaattacatcaatatcaagcagaacggatcttttgtatgacgcttggtacaggcattgggggtgcgtacaaaaataatcaaggtcatattgataatggtgaacttcataaggcaaatgaagttgggtatttattgtatcgtccaactgaaaatacaacgtttgagcaacgtgctgcaacgagtgcattgaaaaaacgcatgattgacggaggatttacgagaagcacacatgtgccagtattgtttgaagcagctgaagaaggtgatgatattgcaaaacaaatattgaatgagtgggcagaagatgtagcagaagggattgcccaaatacaagtcatgtatgatccagggcttatattaattggtggcggtatatctgaacaaggagacaatctcattaaatatatcgagccgaaagttgcacactatttaccaaaagactatgtttatgcaccgatacaaacgactaagagtaaaaatgatgcagcattatatggctgtttgcaatgatggttgaaagaaggagtcattctaaaatagaatttgaaaccgataagagagatgagagctgttgttagttccacacatcacaccctatctaggaccaatctaaactatatcaaccaacagtgtgacacgggcatattaaattgaagaggcttgaaagtatagttctcaaaaatgtaaaaaaatatttggtattgaaattaaaaaagcacctagcaactcgttgggacaatcacgatgattgtctacagttgcaggtggatttgaatatactactagttatttgttgtctaggataatagatttagtatgttgataagtttgactcagattcgtattttctaataaatgataactcacgatatcgattaaaaagagtgtcgcaatttgtgtgttgataaattgatggtcggtattacgcgattgatccgttgttaaaagtactaaatctgcacaatctgtaagtttactaccttcgaaatttgtgatggcaacgacgtatgcaccatgagatttggcgacttccgctgctgaaattaattctgaagtattaccactatttgacatagcaataaacatgtccgaatgagatagtagggatgccgatattttcattaaatgtgaatcggtagtaacattaccttttagccccatacgaatcatacgataataaaattcagtcgctgataaaccagagctacctagtccagcaaagagtatatgccgacttgattgaagtttgtcgataaaggtttggataatgtcgttattaataaattcaccagtttgttgaatgatttgttgatgatatttatgaattctttgaatgattgggctattttcaataactgtctctgtcatttcttgttgaatattaaattttaaatcttggaaattctcataatccagcttatgactaaagcgtgtcatcgttgctggtgatgtaccaatcgcatgggctaaggagttaatcgttgaaaaggcatcgctataaccattttgtcttatataattgacgatgcgtttatcagtttttgtaaataaatgttgataacgttgaacacgattctcaaatttcattgtgtcaccccttcatcttaatgattactattatatatgaaaaatattttcaagatagtaaaaagcattgataaaaattatcttaatgatatattgtaaatgactttacgtgaaaaaactacttatggagtgaggaataatgttaccacatggattaatagtatcttgtcaggcactaccagatgaaccattgcattcatcttttattatgtcgaaaatggcattagctgcgtatgaaggtggtgctgttggtattcgcgcaaatactaaggaagacattttagcaattaaagaaacggtagatttaccagttattggcattgtgaaacgtgactatgatcactcagatgttttcattactgcaacgtcaaaagaagttgatgaactgatagaaagccaatgtgaagtcattgcattggatgcaacgttacagcaacgtccgaaagaaacgttagacgaattagtatcatatattagaacacatgcacctaacgttgaaatcatggctgatatcgcgaccgttgaagaagctaaaaatgcggcacgacttggctttgattatattggcacgacgttacatggctatactagttatacgcaagggcaattactttatcaaaatgactttcaatttctaaaagatgtactacaaagtgttgatgcaaaagtcattgcggaaggtaatgtcattacaccggatatgtataaacgcgtgatggacttaggcgttcattgttcagtcgttggtggtgcgataacacgaccaaaagaaattacgaaacgttttgttcaagttatggaagattaaatgataatgataaaaaacgagatgaccatcattaattaaaggtacctaattatcttaggtgactcaatgaatgtaatgggttcatctcgttttgtttgtttatgatagtgattttattttcaatttgaattatccaaaaatgagtaaagcgaccgggatggtgattaatagcgacaatgccacgcgtaaaaaccaaatgatgatgagtttccagacaggtattttaatttcagttgctagtatacatggcactaatgctgagaaaaagataatggctgatacgcttactacaccgacgacaaatttagtactcattgcagctttagttactaacaaagatggtaaaaacatttctacaatagaaatcgctgaagcttttgcaagtacagcctgatcagcaattgggaaaatataaataaatggatagaatatataaccaagccaatcaatgaatggtgtatagttcgctacaatcagtcctaaaaaaccaatcgataatatagaaggtaaaataccaacagtcatttctaaaccgtctttcaaattgtcccaaacgttcttcacgagggatggtgttaatgcattttgtttcatcgcctctgcatatgcagttttcagtctgcttccttcaatagcaacttcttgttctccttcttgtccgttataatattctgttgattcattggtgattggcggtagccatgcagtaattgcagtcacgacaaatgtgatgactaaagttatcccaaagtataaattccaatgtggcattaatcctaaagttttagcaacgataatcataaaagttgctgaaactgttgaaaaaccagtcgcaataattgtggcttctcgtttgttgtacatcccttgcttatagacacgattagtaatcaataaacctaaggaataactgccgacaaacgaagccactgcatcgacagcggattttcctggtgttttaaaaataggtctcataataggctccatataaacaccgacaaattctaataagccatagcccactaataaagaaagcgcaattgcacctactggaattaagatacttaatggcatcattaatttttcaaacaaaaacggaccatagttagctttaaatagtattgatggaccgattttaaatacatacattataccgattattgcacctgcaactttaaataatgtaatgaccaagtttgtaattgaagtcataaaagtacgtctcactattggtaacgctgtaccaattaaaatcataatcagtgcaacatagggcataagtggacctatgattgagcgaatggctagatgaacatgatcgacgaaaatagtgttgttaccattaatcgtaaaaggaataaagaaacatagtatgcccactaaactatagacaaaaaaacgccatgcacttggttgttgtgcattagaatgatattgattcattaaagcaacccctttgtttaaatgaatacacaaaactgtatgatgcatcttccccttaatgagatgaatcattattttaatttagaaaaatctgaaaacttactataattttatagtttgaattattttcagaccaatacaaattaactaattatatatagattgaaactatattacttaataaaatgtttatcttaaatgttgttgtgttgattcaacgccacaattaaagtatttataaattatttgaggatacagatatttgtaaatgattagtatcgatttaatatcgtattattaaatttttattaattttgtagtcttaatcaaaaaataatatatgtcatgttatattgaaggtgcagttgtttttcattctcaagagggggtcaaaaaaatacttttgaggtgattatatgttaagaggacaagaagaaagaaagtatagtattagaaagtattcaataggcgtggtgtcagtgttagcggctacaatgtttattgtttcatcacatgaagcacaagcctcggaaaaaacaccaacgtctaatgcagcggcacaaaaagaaacactaaatcaaccgggagaacaagggaatgcggtaacgtcacatcaaatgcagtcaggaaagcaattagacgatatgcataaagagaatggtaaaagtggaacagtgacagaaggtaaagatacgcttcaatcatcgaagcatcaatcaacacaaaatagtaaaacaagcagaacgcaaaatgataatcaagtaaagcaagattctgaacgacaaggttctaaacagtcacacccaaataatgcgactaacaaaactgaacgtcaaaatgatcaggttcaaaatacccatcatgctgaacgtaatgaatcacaatcgacaacgtcacaatcgaatgatgttgataaatcacaaccatccgttcctgcacaaaaggtaataccaaatcatgataaagcagcaccaacatcaacaacactcccatctaatgataaaactgcacctaaatcaacaaaagcacaagatgcatccacggataaacatccaaatcaacaagacacccatcaacccgcgcatcaaatcatagatgcaaagcaagatgataatgttcatcaaagtgaacagaaaccacaagttggcgatttaagtaaacatatcgatggtcaaaattccccagagaaaccgacagataaaaatactgataataaacaactaatcaaagatgcgcttcaagcgcctaaaacacgttcgactacaaatgcagcagcagatgctaaaaagattcgaccacttaaagcgaatcaagtacaaccacttaacaaatatcctgttgtttttgtacatggatttttaggattagtaggcgataatgcacctgctttatatccaaattattggggtggaaataaatttaaagttatcgaagaattgagaaagcaaggatataatgtacatcaagcaagtgtaagtgcatttggtagcaactatgatcgtgctgtagaactttattattacatcaaaggtggtcgcgtagattatggcgcagcacatgcagctaaatacggacatgagcgctatggtaagacatataaaggaatcatgcctaattgggaacctggtaaaaaggtacatcttgtagggcatagtatggggggtcaaacaattcgtttaatggaagagtttttaagaaatggtaacaaagaagaaattgcctatcatcaagcgcatggtggagaaatatcaccattattcactggtggtcataacaatatggttgcatcaatcacaacattagcaacaccacataatggttcacaagcagctgataagtttggaaatacagaagctgttagaaaaatcatgttcgctttaaatcgatttatgggtaacaagtattcgaatatcgatttaggattaacgcaatgggggtttaaacaattaccaaatgagagttacattgactatataaaacgcgttagtaaaagcaaaatttggacatcagacgataatgctgcctatgatttaacgttagatggctctgcaaaattgaacaacatgacaagtatgaatccaaacattacgtatacgacttatacaggcgtgtcttcacatactggtccattaggttaagaaaatcctgatttaggtacatttttcttaatggatacaacgagtagaattattggtcatgatgcaagagaagaatggcgtaaaaatgatggtgtcgtaccagtgatttcgtcattacatccgtccaatcaaccatttgttaatgttacgaataatgaacctgccacacgaagaggtatctggcaagttaaaccaatcttacaagggtgggattaacttgtgttaaaaagcctttaatatcagttgttacaaaggatttgtagcgtctttaaaaataaaaaagggcagaaaaagggcagataccttttagtacacaagtttttctaatttttgctctaactctctgtccattttctctgttacatgtgtatacacctttatagtcgttttttcatctgtatgtcctactcttttcataattgcttttaacgatatattcatttccgccaataaacttatgtgtgtatgccttagtgtgtgagtagtaacttttttatttatatttaatgattctgcagctgaggacaatcgtttgtttatcctactgccttgcataggatttccttggcaagttgtgaatataaaccctctatcaacatagcttggttcccattgttgcatctttttattttctaacattatttttttcaatacatttgctatccttgaattgatagcgatttttctttttgaacctgcggtcttcgtagtatctttgtgaccaaatccagcattacatttgattctgtgaatagtgccattaatatcgatcgttttatttttgaggtctacatctttaacttggagcgctaataactcacctatgcgcatacctgttaaagcttgaacttcaacagccccagcaactaaaatacgagctctatactgcatgttattatcgttcagtataaaatcgcgtatctgtattacctgttccatctctaaatagttgtacattttcgcttcttctttttctatatcttctatcgtcttactcttctttggtagtgtgacgctatttaatatgtgttcgtttggataattgtaaaatttaacggcgtatttaatagcttctttcatatgtccaagttgacgctttacctgatttgcagaatatacgtttgataattcgttaataaatgtttgcatgtactttgtatcaattttgtttaaaagtaaattttgagaactgttctttttgatgtttttgattcttgttttcaaattatcaagcgtcgttactttaaagccagatgtttttatatgatattcaagccattcatctaataacgcgtgaaaagtcaaagtttttaattcgcttgacgacttgttgttcagtttttcttttattttttcttctaaacgaaacattgcttctttttgagattgttttgtattcttgttcaacacaacacttacgcgcttccatttatctgtgtatggatctttgtacttctcgtaatatctgtatttagtttcgttatttttgtttttaaatttttcaatccacatgtttatacctcctgtaggaacgtacgttctgtaaatttgtaaaaaataataagggtaggtgggctacccaaaatttagtactaggtactaaatatgttataataaaataaaaagtaggtgataagatgactcaatttctaggggcgcttcttcttacaggagttttaggttacataccatataaatatctaacaatgataggtttagttagtgaaaaaaacaaggttatcaatactcctgtattattgattttttctattgaaacatgtttgatatggttttatagttttataatttttaataatgttgatttaaaaaatttgaatttaattcagttgcttacaggtctaaaagcaaatattttgtttctatttatttttgttttaacagtgtttgtatttaatcctttaattgttaaatttattatctggttaattaatataaccagaaagtttatgaaattggattgtataagcttattagacaaaagagacaagttgtttaataacaacggtaaaccagtatttatagttattaaagactttgaaaacagaatcattgaagagggtgaacttaaaacctataattcagctggtagcgatttcgatttactagaggttgagcgacaagatttcaaagtatctgatttaccgtcaaacgatgaattgtatattaaacatacacttgtagaccttaaacaacaaattaaattggatttatatttaatgaatgaatattaatcttttttcttagctttttctgataaagtgctttttaagttttcgctggcacccggcttttcaaaacttttgtttattgggttactacgggtagcttcttgttttttgtttttatccgccataaaattctcaccaccattcaacgtctacactagtaggcgttttttgatttttatattaaagggctataaaaagctgttaatacttcaattctttaatccacatatatttaaaagtgaggtagtaggtaataaatataagacttaaagttaagattgcttttttcatgtcaatttctcctttgtttatatttatattaaatcactaaatagacgttattaatcacaatacaattaattgattgtaagatacttagtcgtataattctatatacctattagtaaattcttctgctgttatttctccattttctttttgttgttgaagtttagaagcttctttttgaattgcatcgtatttttcacgagaatacccatatttttccatctctttataattagcttcgtttatttgttcttgttgctgaggtgtgacacaaccaccaactgtgcattgtgtaccatcaggttttgtgtaacctataacgtcacctgcgccttgtgcttggtaccaagtattaccatctgcatctaccatgccgttaacattgtgaccattttttactctttgtgatatttcgtctttagttaaaggtctattggtttgttgatcgttgttaacgtttgtgttgttctcgttgtttacttgattattgttatcgttttgattagcattttcttttttcgcttctgctttttctttagtttctttctttttatctttgttatctttctttgtttcagtttttttgctttcctctttcttatcgccgtcgtggctaccacaagcgcctaaaactaacgcactcgctaatgttaaacctaataatcttttcattttaatttctcctttgtttatatttctttatatttaaaaactctcaatggctcaaatgtaattgagtattcgccgtagtgagtcccaataccatatatctttttatattgttctattgcttctaatatgtattcttcactcaattgcagatactcagacaactcatacaagttacgtacaccataattgtaagcttccacaatttcgcgtaacgggactgctgagataaagccgtgtcgccttgcgtaattttcgaacttgcgattgttgaatttcgagtaatcggctatatcaccgtatgtaagtttattatgtgctaattcttcaaagagaattcctgccttttctctatctgataagccacgctttattaaaattaaatctcctaaccataccccatccaaattatctggaagcacatcagcctctcttatttcaatataatcatgttgtattaaagtttcttcatataatcccatctgatacatcctttacttacgtttgcttcttatataatctgcataatctaaaactctttgccattcatcatctgtcaattctccttcaaggtgagctgcacgatgttgtacttcatcatcgttttcttcaacccaccccattaaatatgcaggattaacatttaatgcagtagctatactttctatagtatcgttttttaaatttttgatatttccgctttcataacgctgtacagtagcttcagttttaccaatttttcttcctagttcggccaaagtcataccttgtttttctcttgattgtttcattctttttgaaaagcacatcgtaatacagctccttttacttgatagttctattataaggaaaactttcggcatttgcaatatttttctaaaaaactttcgtaaagtgcttgacctctttcgtaacatcatgataagattacttacgtaatacgaaaggtggtgaaaagaaatgcctatagatgctaaacttttgaaatctaaaatggctttgaaagaacataacatcaaaaccctttctgaagaaattggtgttaatagagatactttatctaatatgattcacgggagaacgaaaccgtcgtacccggtaataaatggtatttattttgcgttagaattgacacctcaagaaggaagagatattttttttaacgaagacttacgcaaaaagaaagttttaacttaaggaggaaactgaaatgcaagcattacaaatagtagaacagaacgaaacacattatgtagacagtagagaagttgcggaaatgataggaaagcgacacgacaatttagtaagagacattaaaggttatatcaaggttttagaggactcctcaaaattgagtagtcataatttctttgaagaaagcacctatgttaattcacaaaacaaagtacaaccttgttacctactaaccaaaaaaggttgcgacatagtagcaaacaagatgacaggtagtaaaggcattttgtttactgcaacttatgttgatgcatttcataaaatggatgaatacattaaacaacaagcacagcttaatgtaccacaaacaccaatgcaagcattagagatgatgttcaaagcacaaaaagaccaagaacagtttaacaaacaaatgcaacaagaaatcacaggcattcgtcacattgtcggtattgaaacgaaaaactggcgtaacgacacaaacaaaatgttatctgcgattgcacaacatttaggtggcggagcaatgcaccagaaagttaagtctgaagcatataaagctttagaagaaaaaggacgctgtaatttaaaaattcgtatgcagaaccgcaaaggcaaaatgctagcgaatggtgcaacgaaaacccagattaacaagttgtcaaaattagatgtgattactgatgaacctagattggttgagatatacatttcagtgattaagagtatggcgattaaatacggtgtagatattagccaatttgaaatttaaacaaacatcttaaaaggaggaacaacaaatgttacaaaaatttagaatcgctaaagaaaaaagtaaattaaaactcaatttactaaaacatgcaaacagtaatttagaaacaagaaacaaccctgaactgttgcgagcagttgcagagttgcttaaagagattaatcgataaattctatgaattcgattttagctgaagcgatagctactattttgtctccaacaaaagtatatgagccattagtgaacaaggaacttttaattttttcttttgatatttcaacagttccgcgatgacctgactttatcactttttctaaattatcgatttcaacaaatttatcattagaaagatataaacaagctttcatacttatcacctccttaggttgataacaacattatacacgaaaggaggaataacaaatgaaactactaagaaggctattcaataaaaaacacgaaaacttaattgacgtgtggcatggaaatcaatggttaaaagtgaaagaaagcaaattaaaaaaatataaagtggtctcggatagagaaggtaagaaatatctaattaaataagcgcacttaattagtgcaagtaatcaagtgcgctattgccttacaatcctaaatcttttctgcttttttcttcttcttgtaatcccaataacacagaagagtaaatgctgaaatagtcacgagcaacgctatctttagcgaatgcaattacgtcatcaccgacttcttgccattcgttatgaatcttatgtctatctagagctctaggtaatagcgagattgtaatatcgtgagcaattttctctaaatccataaatttcacctccttccactgggagataactaaattatataacaaaacaacttaaaggaggaacgacaaatgcaagctcaaaacaaaaaagtcatctattactactatgacgaagaaggtaataggcgaccattagatattcaaattaatgacggatatgaactgatggtccgatctcatttcatcaacaacaccattgaagaaataccatacgtaaataataacttatatgccttggttgatggttatgaatttaagttagattgaatttttgagaaagatattgaaaagctaatttccccataagattaagagacatactggatgttttgttaacgactcttttaacttcgttccaagttttattgtctctaatattatcgagaaattcatggccagaccaagtgatgtcatcaataatccaagaaacgaccctgccttcgatgaatttcagatcgcaacaaataaatttagcttcttctaattttaaaagtgagtacattactgtttcaaaatcatatttatcaaaaataatattatcgttgaaattatgtcgagtaagtggttcacctattttcttattagattctatttctaagagcaagagtctaacgcaatcgtgattaagtttcatcctatcacctccataacaggagtatagcagaaaggatcataaacatcttaaaaggaggaataacaaatgaacattcaagaagcaactaagatagctacaaaaaatcttgtctctatgacacggaaagattggaaagaaagtcatcgaactaagatattaccaacaaatgatagttttttacaatgcatcatttcaaatagcgatgggacaaaccttatcagatattggcaaccttcagccgatgacctcatggcaaatgattgggaagttataaacccaactagagaccaggaattattgaagcaattttagaaatgctatcaatgatactttttaaattgtttttaaactcattttcaaagtaaacaacagtcttgtctgaaattgttacatgataaatagtgttactagcatacacgccgtttaggaacccagagtttttaagtttatttaaatcgttttttacatcttcgaaatgtagtttttgaaaatactttgtatgtatatctttagcacttccaaaattattgcaggttaatttaaccgaacctaactttacacattctaaataatctttgtagagtacggacaagatatattgttggtctttagtaagtgtatcaaattcatcagatatcaagggcatgttatcacctccttaggttgataacaacattatacacgaaaggagcataaacaaatgaacacaagatcagaaggattgcgtataggcgtcccacaagtttctagcaaagctgatgcttcttcatcctatttaacggaaaaggaacgtaacttaggagcggaaatattagagcttattaaaaaaagtgattacagctacttagaaataaacaaagttttctatgcattagatagagaacttcaatacagggcgaataataacaaactttaacatttatctaaaggagtgatagagatgccaaaaatcataataccaccaacaccagaaaacacatatcgaggcgaagaaaaatttgtgaaaaagttatacgcaacacctacacaaatccatcaattgtttggagtatgtagaagtacagtatacaactggttgaaatattaccgtgaagataatttaggtgtagaaaatttatacattgattattcagcaacgggaacattgattaatatttctaaattagaagagtatttgatcagaaagcataaaaaatggtattaggaggattatcaaatgagcgacacatataaaagctacctattagcagtgttgtgcttcacggtcttagcgattgtactcatgccgtttctatacttcactacagcatggtcaattgcgggattcgcaagtatcgcaacattcatattttataaggaatacttttatgaagaataaagaaactgctacttgttggagcaagtaacagtgcaagatgagcaattgtcttaaataattatataaggagttattaatatgaccttacaacaaaaaatactatcacattttgcaacatatgacaatttcaattctgatgatgttgttgaagtttttgggatatctaaaacacatgcaaaatccacactttcaagacttaagaaaaaaggaaagattgaattggaaagttggggtatctggcgtgttgttgaaccgcagttacatttaactgttgtagaacgtaagaaagagatattagaagaacaattcgagttattggcaagattaaacgaacaaagtgatgaccctagagaaatagaagaacgcatcaagttaatgattcgtttagccaaccaattttaaggaggagttaatcaatggcaatattagaaggtatttttgaagaattaaaactattaaataagaatttacgtgtgctaaatactgaactatcaactgtagattcatcaattgtacaagagaaagttaaagaagcaccaatgccaaaagatgaaacagctcaactggaatcagttgaagaagttaaggaaacttctgctgatttaactaaagattatgttttatcagtaggaaaagagttccttaaaaaagcagatacttctgataagaaagaatttagaaataaacttaacgaacttggtgcggataagctatctactatcaaagaagagcattatgaaaaaattgttgattttatgaatgcgagaataaatgcatgaagctagatcactcaaatagagctcatgcaaagcttagtgcaagtggagcaaaacaatggctaaactgcccaccgagtattaaggcaagtgaaggtattgcagataaaagttcagtttttgctgaagaaggtacattcgcccatgaattaagtgagttatatttcagtcttaaatatgaaggcctaacacagtttgagtttaataaagcttttcaaaattataagcgaaatcaatattacagtgaagagttgcgtgaatatgttgaagagtatgtagctaatgtagaagaaaaatataacgaagctttgagtagggataatgatgtaatagctttatttgaaacaaaattggatttaggtaaatacgtccctgaatcttttggtactggtgatgtcattatattttcaggtggtgtacttgaaattattgaccttaaatacggtaaaggcattgaagtttcagctatagataatcctcaacttagattatatggcttgggcgcatatgaactgcttagtttaatgtatgacattcatacagttcgcatgactatcatacaaccacgaatagataacttttctactgaagagttaccaatatcaagattacttcaatggggaaccgattttgttaaaccattagccagacttgcttataacggtgaaggtgagtttaaagcaggtagtcattgtagattctgtaagataaagcattcatgtagaacacgtgcagaatacatgcaaaatgtgcctcaaaagccaccacatttgttaagtgatgaagagattgcagaacttttatataaactgcctgatatcaaaaaatgggctgatgaagtagaacattatgcgctagatcaagcgaaagaaaatgataaaaactatcctggttggaagcttgtagaaggtcgttcgcgaagaatgataactgatacaaaagcaacgcttgaaaagttagttgaagcgggttataaacctgaagatattacagaaaccaagttacttagcattacgaaattagaaaaattaattggtaaaaaagcattttctaaaattacagagggctttatagaaaagccacaaggtaaattaacacttgctaccgagtctgataaacgaccagctataaagcaatctgctgaagatgattttgacaaactataaaaattaaaaaggacggtatataaacatgaaagcaaaagtattaaataaaactaaagtgattacaggaaaagtaagagcatcatatgcacatatttttgaacctcacagtatgcaagaagggcaagaagcaaagtattcaatcagtttaatcattcctaaatcagatacaagtacgataaaagccattgaacaagctatagaagctgctaaagaagaaggaaaagttagtaagtttggaggcaaagttcctgcaaatctgaaacttccattacgtgatggagatactgaaagagaagatgatgtgaattatcaagacgcttattttattaacgcatcaagcaaacaagcacctggtattattgaccaaaacaaaattagattaacggattctggaactgttgtaagtggtgattatattagagcttcaattaatctatttcctttcaacacaaatggtaataagggtatcgcagttggattgaacaacattcaacttgtagaaaaaggcgaacctcttggcggtgcaagtgcagcagaagatgatttcgatgaattagacactgatgatgaggatttcttataagtcaataggtggggttttagccccactttaattttaaagaaattgaggtgtcaagaatttgagatttatgaatatagatattgaaacatatagcagtaatgatatttcgaaatgtggtgcctataaatacacagaagctgaagatttcgaaattttaattatagcttattcaatagatggtggagcgattagtgcgattgacatgactaaagtagataatgagcctttccacgctgattttgagacgtttaaaattgctctttttgatcctgctgtaaaaaagtatgcattcaatgctaatttcgaaagaacttgtcttgctaaacattttaataaacagatgccacctgaagaatggatttgcacaatggttaattcaatgcgtattggcttacctgcttcgcttgataaagttggagaagttttaagactacaaaaccaaaaagataaagcaggtaaaaatttaattcgttatttctctataccttgtaaaccaacaaaagttaatggaggaagaacaagaaacttgcctgaacatgatcttgaaaaatggcaacaatttatagattactgtattcgagatgtagaagtagaaatgacgattgctcataaaattaaagactttccagtaactgcaattgaacaagcatattgggtttttgaccaacatataaacgacagaggtattaagctttctaaatcattgatgttaggagctaatgtgctcgataagcagagtaaagaagaattgcttaatcaagctaaacatataacaggtttagaaaatcctaatagtcctacacaattattggcttggttaaaggatgaccaaggattagatatacctaatttacaaaagaaaacggttcaggagtacttaaaagaagcaacaggaaaagctaaaaaaatgctagaaattagattgcaaatgtctaaaaccagtgtgaaaaaatacaacaaaatgcatgacatgatgtgcagtgatgaacgggtaagaggtctgtttcaattttacggtgccggtactggaagatgggcaggtagaggtgtacaacttcagaatttaacaaagcattatatttcagatactgaattagaaatagcaagagatcttattaaagaacaacgttttgacgatttagatttattactcaatgttcatcctcaagacttattaagtcaattagttaggacgacatttactgctgaagaaggtaatgaactagcagtaagtgatttttctgcaatagaggcaagagtcatagcatggtatgcaaaagaacaatggcgtttagatgtgttcaacacacacggaaagatatatgaagcatcggcttctcaaatgtttaatgtaccggtagaaagcataactaaaggcgaccctctcagacaaaaaggaaaagtgtccgaattagctttaggctatcaaggtggcgctggagctttaaaagcaatgggtgcattggaaatgggcattgaagaaaacgagttacaaggtttagttgatagttggcgtaacgcaaatcctaacatagttaatttttggaaggcttgccaagaggctgcaattaatactgtaaaatcccgaaagacgcatcatacacatggacttagattttatatgaaaaaaggttttctaatgattgaattgcctagtggaagagctttagcttatccgaaagcttcagttggtgaaaatagttggggtagtcaagttgttgaatttatgggcttagatcttaaccgtaaatggtcaaagttaaaaacgtatggtgggaagttagtcgagaatattgttcaagcaactgcaagggatttacttgcgatttctatagcaaggcttgaagcatcaggttttaaaatagttggtcatgtccatgatgaagtaattgtagaaatacctagaggttcaaatggacttaaggaaatcgaaactatcatgaataagccggttgaatgggcagaaggtttaaatttgaatagcgacggatttacatcacccttctatatgaaggattaggaggatagattatgacaataaaggaattagaagagaagtttaacatctctcgatattttgttgtaaagcatgatagggattgggaaacaggtgaaattattgacacttgtattgttttagatgaatatgcggaccatatcaacatagaagttgaggaagtgatctaatgcaacaacaagcatatataaatgcaacgattgatataagaatacctacagaagttgaatatcagcattacgatgatgtggataaagaaaaagatacgctggcaaagcgcttagatgacaatccggacgaattactaaagtatgacaacataacaataagacatgcatatatagaggtggaataaatgagtatcgtaaagattaacggtaaaccatataaatttaccgaacatgaaaatgaattgataaaaaagaacggtttaactccaggaatggttgcaaaaagagtacgaggtggctgggcgttgttagaagccttacatgcaccttatggtatgcgcttagctgaatataaagaaattgtgttatccaaaatcatggagcgagagagcaaagagcgtgaaatgtctaggcaacgacgtaaagaggctgaactacgtaagaagaagccacatttgtttaatgtaccacagaaacattcacgtgatccgtactggtttgatactacttataaccaaatgtttaagaaatggcaggaagcataaatgcctaaaaccgatagcgcatgtaaagaatacttaaaccaatttttcggatctaagagatatctgtatcaggataacgaacgagtggcacatatccatgtagtgaacggcacttattactttcatgggcatatcgtgccaggttggcaaggcgtgaaaaagacatttgatacagcggaagagctcgaaacatatataaagcaacatgggttggaatatgaggaacagaagcaactaactttattttagaggagatggaaataatggcaaagattaaaagaaaaaagaaatgaatttacctgaacttatccaatgggcttgggataaccccaagttatcaggtaataaaagattctattcaaatgatgttgaacgcaactgttgtgtgacttttgatgttgatagcatcttatgtaatgtgactggatacgtatcaattaacgataaatttactgttcaagaggagatataacaatgaaaatcaaagttaaaaaagaaatgagattagatgaattaattaaatgggcgcgagaaaatccggatctatcacaaggaaaaatatttttttcaacaggatttagtgatggattcgttcgttttcatccaaatacaaataagtgttcgacgtcaagttttattccaattgatatccccttcatagttgatattgaaaaagaagtaacggaagagactaaggttgataggttgattgaattattcgagattcaagaaggagactataactctacactatatgagaacactagtataaaagaatgtttatatggcagatgtgtgcctaccaaagcattctacatcttaaacgatgacctaactatgacgttgatttggaaagatagggagttggtagaatgatgcaaacctataaatgattattacgaaatatataaaggcgataaactagctcaattggttatcgtacctatatggacacctgaactaaagcaagtggaggaattcgagagtgtttcagaacgtggagcaaaaggcttcggaagtagcggagtgtaaagacatcttagatcgggtcaaggaggttttggggaagtgacacaatacttagtcacaacatttaaagattcaacaggacgtaagcatacacacataactaaagctaagagcaatcaaaggtttacagttgttgaggcagagagtaaagaagaagcaaaagagaaatatgaggcgcaagttaaaagagatgcaattgaatcaatcacacttattgaggagcgtgggaaatgaatcagctgagaattttattacatgacggtagtagtttgatattacatgaagatgaattatttaacgaaatagtatttgttttggacaattttagaaatgatgatgactatttaacgatagaaaaagattatggcagagaacttgtattgaacaaaggttatatagttgggattaatgttgaggaggcagacgatgattaacatacctaaaatgaaattcccgaaaaagtacactgaaataatcaaaaaatataaaaataaaacacctgaagaaaaagctaagattgaagatgattttattaaagatattaaagataaagacagtgaattttacagtcctacgatgggtaatatgaatgaacatgaattaagggctatgttaagaatgatgcctagtttaattgatactggagatgacaatgatgattaaaaaacttaaaaatatggattggttcgatatctttattgctggaatactgcgattattcggcgtaatcgcactgatgcttgttgtcatatcgcctatctatacagtggctagttaccaaaacaaagaagtacatcaagggacaattacagataaatataacaagagacaagataaagaagacaagttctatattgtattagacaacaaacaagtcattgaaaactccgacttattattcaaaaagaaatttgatagcgcagatatacaagctaggttaaaagtaggcgacaaagtagaagttaagacgattggatatagaatacactttttaaatttatatccggtcttatacgaagtaaagaaggtagataaacaatgattaaacaaatattaagactattatttttattagcaatgtatgagctaggtaagtatgtaacggagcaagtatatattatgatgacggctaatgatgatgtagaggagccgagtgattttgaaaaaatcagagctgaagtttcatggtaatagatattatcatttttgaattaattatattaatgtgtttagcaatagcactggaggtgttgtaaatatgtggattgtcatttcaattgttttatctatatttttattgatcttgttaagtagcatttctcataagatgaaaaccatagaagcattggagtatatgaatgcttatcttttcaagcagttagtaaaaaataatggtgttgaaggtttagaagattatgaaaatgaggttgaacgaattagaaaaagattcaaaagctaaagagaggcgttggcttctctgctctatctaaaataatgaaaggagccgaacatgttagacaaagtcactcaaatagaaacaattaaatatgatcgtgatgtctcatattcttatgctgctagtcgcctatccacacattggactaatcacaatatggcttggtctgactttatgcagaagctagcacaaacagttagaactaaagaagatttaactgagtacaataaaatgtctaagtccgaacaagcagatataaaagatgttggcggatttgtcggcggttatttaaaagaaggtaaacggcgtgctggtcaagtcatgaatcgttcaatgctaacacttgatatcgattatgctgctcaagatatgaccgacatattatctatgttttatgattttgcatattgtttatattcaacacataagcatagagagataagtccaagactgcgtttagtgattcctttaaaacgaaatgtaaatgcagatgagtatgaagctattgggcgtaaagtcgcagatatcgttggcatggattacttcgatgatacaacttatcaaccacataggttaatgtattggccttcaactagtaacgatgcggaatttttctttacctatgaagatttacctttgttagacccagataaaatattaaatgaatatgttgattggactgacacattagaatggccaacgtcttcaagggaagagagtaagactaaaagattagcagataagcaaggcgacccagaagaaaagccgggaattgttggtgcattttgtagagcctatacgatagaagaagctatagaaacttttattcctgatttatacgaaaaacattctactaaccgttatacctatcatgaaggttcaactgcaggtggattggtgttatacgaaaataacaagtttgcctattctcatcataatacggatcccgtaagcggtatgcttgtgaacagttttgatttagtacgcatacacttatatggtgctcaagatgatgacgctaatacagatactccggttaatcgactacctagttataaagcaatgcagcaaagagcgcaaaatgatgaagttgttaaaaagcaattaattaacgacaaaatgtctgatgcaatgcaggatttcgatgaaatagtaaatagcgatgatgcatggtctgagacgttagaaattacttcgaaaggtactttcaaagctagtatcccaaatatagaaattatattgcgtaatgatccaaatttaaaaggaaaaatagcatttaatgaatttacaaaacaaattgaatgcttagggaaaatgccatggaataataattttaaaatacgtcaatggcaagacggtgatgatagcagtttaagaagttatatcgaaaagatttatgacatacaccattcaggcaaaacaaaagatgccattataagcgtagcaatgcaaaatgcttatcatccagtaagggattatctaaataaaatatcgtgggatggacataaacgtcttgaaaagttatttatcaaatacttaggtgttgaagacactgaagtgaatagaacaactaccaaaaaggcattgactgctggaatcgctcgagtaatggagccaggatgtaaatttgactatatgcttacactttatggtcctcaaggtgtaggtaaatctgctttgctaaaaaaattaggtggtgcatggttttctgacagtttagtttctgttactggtaaggaagcatatgaggcattacaaggcgtttggttaatggaaatggcagaacttgcagctacaagaaaagctgaagttgaagccattaagcatttcatatctaaacaagttgaccggtttcgtgttgcttatggacattatattgaagattttccaaggcaatgtattttcattggtacaactaataaagttgatttcttaagagatgaaactggtggaagacgtttttggccaatgactgtaaatccagagagagttgaagtgaactggtctaaactaaccaaagaagagatcgaccaaatctgggcagaagctaaatactattatgaacaaggagaagagttattccttaaccctgaactagaagaagaaatgcgttcaatccaaagcaaacatactgaggaatctccatatacaggtattattgatgaatatcttaacacgccaatcccaagcaattgggaagacttaactatctttgaacgaagacgattttatcaaggtgatgttgatatgttaccaacaggaaatgtagattacgttgaaagaaataaggtctgtgcgcttgaagtgtttgttgaatgttttggtaaggataagggagatagtagaggatctatggaaattagaaagatttcaaacatcttaagacaattagacaattggtctgtatatgatggtaataaaagtgggaaaattcgattcggaaaagattatggtgtacagatagcgtatgtaagagatgaaagtttagaggatttaatataagaaatattgaataaatatacatttttagatgttgtatcagatgttgcatcattttttgagtgatgcaacacgtgagtgtaaaaagtaatcgtaggtgttgcatcatttttagtgatgcaacattgatgcaacaaatgatacaacacctctttcccttctcgctgtaaggttcaaccctgtttgtttccaatgttgcatcaaattcactataaagtttaaaaagtagtgttagggagtaaagaggtataggggtaaccctctaacagctatttttaaaagtttggcaagaattgatgcaacatcggaacacaaatataaattttgtatacaaggtgaatatatgaaagaatcgacattagaaaaatatttagtgaaagagataacaaagctaaacggtttatgtttaaaatgggttgcacctggaacaagaggtgtgccagatagaattattattatgccagaaggaaaaacatattttgtagaaatgaagcaagaaaaaggaaagttgcatcctttacaaaaatatgtgcatagacaatttgaaaatagagatcataaagtatatgtgttatggaataaagaacaagtaaatacttttatcagaatggtaggtggaacatttggcgattgacttcaaaccacatagctatcaaaagtatgcaatagataaagtgatagataatgagaaatacggtctgtttttagatatgggtctagggaaaacagtatcaacacttacagcatttagtgaattgcagttgttagacactaaaaaaatgttagttatagcacctaaacaagttgctaaagatacatgggttgatgaagttgataagtggaaccatttaaatcatctgaaagtgtctttagttttaggaacacctaaagaaagaaatgatgcattaaacacagaggctgatatctatgtaaccaataaagaaaatactaaatggttatgtgatcaatataaaaaagaatggccatttgacatggttgtgattgatgaactgtctacatttaaaagtcctaagagtcaaaggtttaaatctattaaaaagaaattaccactcattaatagatttataggattaacaggaacacctagtccaaatagtttacaggatttatgggctcaagtttatttgatagacagaggtgaaagacttgagtcttcattcagtcgttatcgagaaaggtactttaaaccaactcatcaagttagcgaacatatttttaagtgggagctaagagacggatctgaagaaaagatatataaacaaatagaagatatatgtttaagcatgaaagcgaaagattatctggatatgcctgacagagttgatactaaacaaacagtagtcttatcagaaaaagaaagaaaagtatatgaagaattagaaaaaaactatattttagaatcggaagaagaaggaacagttgtagctcaaaatggggcatcattaagtcagaaactacttcaactatctaacggcgcagtttatacagatgaggaagatgtaagacttatacatgataagaagttagataagttagaggaaattatagaggagtctcaaggccaaccaatactattgttttataacttcaaacacgataaagaaagaatacttcaaaggtttaaggaagcaaccacattagaggattcaaactataaagaacgttggaacagtggagacattaagttgcttatagcacatccagcaagtgcaggacatggattaaacttacaacaaggtgggcacattattgtttggtttggacttacatggtccttggaattataccaacaagcaaatgctagattatacagacaaggacaaaatcatacgactattattcatcatatcatgaccgataacacaatagatcaaagagtatataaagctttacaaaataaagaactaacgcaagaagaattgatgaaagctattaaagcaagaatagctaagcataagtaatggaggtataagatgggaaaggcatcatatgatattaagccaggaacatttaaatatattgaatcagaaatatataatttaaatgagaacaagaaagagataaatagattgagaatggagatacttaacccaacgaaagaactagacaccaacattgtgtatggaccgttacaaaaaggagagccagttagaacaactgagttaatggcgacaaggttattgactaataagatgttacgtaacttagaagagatggttgaagcagttgaaagtgagtacttaaagttacctgaagatcataagaaagtaataaggttaaagtattggaataaagataagaagctaaagatagaacaaataggagatgcttgtcacatgcatcgcaatacagttactacaatacgaaagaactttgttaaagcgatagcgtatcatgcaggtatcaaataacattgtgcaaagattgtgcaaaaggcctacaaatctgtagtaatatgatagtatcggaaagatgtataaagttatctgaaagttatacgacataaatacatgaggcgcatcgctaagcggtgtgtcttttgttatgcaatcaaagaggtgtaagagatgaccaagcataataacatttataagcatggtcgtaagtcatatcaatacgattggttctatcattcaaaagcatggaagaagttaagagagatagcattagatagagataattatctttgtcaaatgtgtttacgcgaagatattataacagatgcaaagattgtgcatcacattatttatgttgatgaagattttaacaaagctttagacttagataatctaatgtcagtttgttatagctgtcataacaaaattcatgcaaatgataatgacaaaagtaatcttaagaaaattagagttctaaaaatttaaataaaaaaattatttaaataaaattttatgcccccctgcccatcggcttaaaatgttttttcgccgggtaccggagaggcccaaacgctagcaacgcggataaatttttcatgaaagggggtctttatatgaagttaacaaaaaaacagctaaaagaatatatagaagattacaaaaaatctgatgacatattaattaatttgtatatagaaacatatgaattttattgtcggttaagagatgaacttaaaaatagtgatttaatgatagagcatacaaacaaggctggtgcgagcaatattattaagaatccattaagcatagaactgacaaaaacagttcaaacactaaataacttactcaagtctatgggtttaactgcagcacaaagaaaaaagatagttcaagaagaaggtggattcggtgactattaaagttttaaatgaaccttcaccaaaactattaacaacatggtatgcagagcaagtcactcaagggaaaataaaaacaagcaaatatgttagaaaagaatgtgagagacatcttagatatctagaaaatggaggtaaatgggtatttgatgaagaattagcgcatcgtcctattcgatttatagaaaagttttgtaaaccttccaaaggatctaaacgtcaacttgtattacagccatggcaacattttattatcggcagtttgtttggttgggttcataaagaaacaaaactgcgcaggtttaaagaagctttgatatttatggggcgaaaaaatggtaaaacaaccactatttctggggttgctaactatgctgtatcacaagatggagaaaatggtgcagaaattcatttgttagcaaacgtaatgaaacaagctaggattctatttgatgaatctaaggcgatgattaaagctagcccaaagcttgataaaaatttcagaacattaagagatgaaatccattatgacgcaacgacatcaaaaattatgccccaagcatcagatagcgataagttagatggattgaatacacacatggggatttttgatgaaattcatgaatttaaagactataaattgatttcagttataaaaaactcaagagctgcaaggttacaacctcttctcatctacattacgacagcagggtatcaattagatggtccacttgttgatatggtagaagcgggaagagacaccttagatcaaatcatagaagacgaaagaactttttattatttagcatctttggatgatgacgatgatattaatgattcgtcgaactggataaaagcaaatcccaacttaggtgtctctataaatttagatgagatgaaagaagagtgggaaaaagctaagagaacaccagctgaacgtggagattttataaccaaaaggtttaatatctttgctaataatgacgagatgagttttattgattacccaacactccaaaaaaataatgaaattgtttctttagaagagctggaaggcagaccgtgcacgattggttatgatttatcagaaacagaggactttacagccgcgtgtgctacttttgcgttagataatggtaaagttgcagttttatcgcattcatggattcctaagcacaaagttgaatattctaacgaaaaaataccctatagagaatgggaagaagatggcttattaacagtgcaagacaagccttatattgactaccaagatgttttaaattggataattaagatgaatgagcattatgtagtagaaaaaattacttatgatagagcgaacgcattcaaactaaatcaagagttaaaaaattacgggtttgaaacggaagaaacaagacaaggagctttgaccttgagccctgcattgaaggatttaaaagaaatgtttttagatgggaaaataatatttaataataatcctttaatgaaatggtatatcaataatgttcagttgaaactagacagaaacggaaactggttgccgtctaagcaaagcagatatcgtaaaatagatggctttgcagcatttttaaacacatatacagatattatgaataaagttgtttctgatagtggtgaaggaaacatagagtttattagtattaaagacataatgcgttaaggaggtgaatgttatcgcaaaagagaatattgtcacacgcataaagaaaaaattgatagacaattggattgatcagtcaacttctaagctttatgactttagcccatggaaaaatagatctttttggggtgtaattaataatacgcttgaaactaatgaaacgatattttcagctattacaaagttatctaattcgatggctagtttgcccttgaaaatgtatgaagattataaagtagttaatacagaagtatctgatttacttacagtgtcaccgaataattctctgagcagttttgattttattaatcaaattgaaacaatcagaaatgaaaaaggtaatgcatatgtgctaattgaacgagacatctatcatcaaccatcaaagcttttcttattaaatccagatgttgttgaaatgttaattgaaaaccaatcacgtgaactttattattccattcatgctgcaactggaaataaattgattgttcataatatggacatgctgcattttaaacacatcgtggcatctaatatggtgcaaggcattagtccgattgatgtgttgaagaatacaactgattttgataatgcagtaagaacctttaatcttacagaaatgcaaaaacctgattctttcatgcttaaatatggttccaatgtaggtaaagaaaaaaggcagcaagtgttagaagatttcaaacagtactatgaagaaaacggtggagtattattccaagagcctggtgttgaaatcgaaccgttacctaaaaaatatgtctctgaagatatagtggcaagcgagaatttaacaagagaaagagtagctaacgtttttcaattgccctcagtattcttaaatgcaagatcaaatacaaatttcgcgaaaaatgaagagttaaacagattttacttgcagcataccttattgccaatcgtcaaacagtatgaagaagaatttaatcggaaactacttactaaaacagacagagaaaaaaataggtattttaaatttaacgttaaatcttatttaagggctgatagtgcaacacaagcagaagtgtactttaaagcagttcgtagtggttactacactataaatgacattagagagtgggaagatttaccaccagttgaaggtggagataagccgctaataagcggtgatttatacccaattgacacgccacttgaattaagaaaatctttgaaaggtggtgataaaaatgtcaatgaaagctaagtattttcaaatgaaaagaaaatcaaaaagtaaaggtgaaatatttatttatggtgatattgtaagtgataaatggtttgaaagtgatgtaactgctacagatttcaaaaataaactagatgaactaggagacatcagtgaaatagatgttcatataaattcatctggaggcagtgtatttgaagggcatgcaatatacaatatgctaaaaatgcatcctgcaaaaattaatatctatgtcgatgccttagcggcatcaattgctagtgttatcgctatgagtggtgacactatttttatgcacaaaaatagttttttaatgattcataattcatgggttatgactgtaggtaatgcagaagaattaagaaagacagcggatttacttgaaaaaacagatgctgttagtaattcagcttatttagataaagcaaaagatttagatcaagaacacttaaaacagatgttagatgcagaaacttggcttactgcagaagaagccttgtctttcggcttgatagatgaaattttaggagctaatgaaataactgctagtatctctaaagagcaatataagcgtttcgagaacgtcccagaagatttaaagaaagatgtagacaaaatcactaaaatcgatgatgtagatacgtttgaattggttgaaacacctaaagaaagtatgtcactagaagaaaaagaaaaaagagaaaaaattaaacgcgaatgcgaaattttaaaaatgacaatgaattattaggaggaaatgaaatgccgacattatatgaattaaaacaatccttaggtatgattggacaacaattaaaaaataaaaatgatgaattgagtcagaaagcaacagatccaaatattgatatggaagacatcaaacaactagaaacagaaaaagcaggtttacaacaaagatttaacattgttgaaagacaagtgcaagacattgaagagaaagaaaaagcgaaagttaaagataaaggagaagcttatcaatctttaagtgataatgagaagatggttaaagctaaggcagagttttatcgtcacgcgattttaccaaatgaatttgaaaaaccttcaatggaggcacaacgtttattacacgctttaccaacaggaaatgattcaggtggagataagctcttaccaaaaacactttctaaagaaattgtttcagaaccatttgctaaaaaccaattacgtgaaaaagctcgtctaactaacattaaaggtttagagattccaagagtttcatacactttagacgatgatgatttcattacagacgtagaaacagcaaaagaattaaaagcaaaaggtgatacagtcaagttcactactaataaattcaaagtatttgctgcaatttcagatactgtaattcatggatcagatgtagatttagtaaactgggttgaaaacgcactacaatcaggattagcagctaaagagcgtaaagatgccttagcagtaagtcctaaatctggattagaacacatgtcattttataatggatctgttaaagaagttgagggagcagacatgtatgatgctattattaacgctttagcagatttacatgaagattatcgtgataacgcaacaatttatatgcgatatgcagattatgtcaaaattattagtgttctttcaaatggaacaacaaatttctttgacacaccagcagaaaaagtatttggcaaaccagtagtatttacagatgcagcagttaaacctattgtgggagatttcaattattttggaattaactatgatggaacaacttatgacactgataaagatgttaaaaaaggcgaatatttgtttgtattaactgcatggtatgatcagcaacgtacattagacagtgcattcagaattgcaaaagcaaaagaaaatacaggttcattacccagctaagccccaaaaggttaatgtaacagctaaggctaaatcagctgtaatatcagccgaataggggtgatgaaatgagtttagaagaaattaaattgtggttgagaattgactataatttcgaaaatgatttaattgaaggtctcattcaatcggctaagtctgaattactattaagtggggttccagattatgacaaagatgacttggaatacccgcttttttgtacagcgattagatatatcattgcaagagattatgaaagtcgtgggtactcaaatgaccaatctagaagcaaggtttttaatgaaaagggattgcaaaaaatgattctgaaattaaaaaagtggtaggtgatttttaaatggaatttaatgaatttaaagatcgcgcatatttttttcaatatgtaaataaagggccgtatccagatgaagaggaaaaaatgaaattgtatagttgcttttgtaaaatatataatccttctatgaaagatagagaaattttaaaagtgactgaatcaaagtcaggactaaccataattatgaggtcttttaaaattgaatatctaccacaaacaaatcacttagttaaaattgacagaggcttatattccgataaattattcaacattaaagaaataagaattgatacaccagatattggctataatacagtggttttatcagaaaaatgagtgtagaaattaaagggatacctgaagtgttgaagaaattagaatcggtatacggtaaacaatcaatgcaagctaagagtgatagagctttaaatgaagcatctgaattttttataaaggctttaaagaaagaattcgagagttttaaagatacgggtgctagcatagaagaaatgactaaatctaagccttatacaaaagtaggaagtcaagaaagagctgttttaattgaatgggtaggccctatgaatcgcaaaaacattattcacttgaatgaacatggttatacaagagatggaaaaaaatatacaccaagaggttttggagttattgcaaaaacattagctgctaatgaacggaagtatagagaaattataaaaaaggagttggccagataaatgaatatattaaacaccataaaagaaattttattatctgatgcagagctccaaacatatataaattctagaatatactattataaagtcactgaaaatgctgaaacttccaaaccttttgttgttattacacctatttatgatttaccttcagacttcatgtctgataaatatcttagtgaagaatacttaattcaaatagatgtagaatcttcaaataatcagaaaacaattgatataacaaaacgaataagatatctgttatatcaacaaaatttaattcaagcatctagtcagttagatgcttattttgaagaaactaaacgttatgtgatgtcgagacgttatcaaggcataccaaaaaatatatattataaaaatcagcgcatcgaataggtgtgctttttaatttttaaggaggaaataagcaatggcagaaggacaaggttcttataaagtaggttttaaaagattatacgttggagtttttaacccagaagcaacaaaagtagttaaacgcatgacatgggaagatgaaaaaggtggtacagttgatctaaatatcacaggtttagcaccagatttagtagatatgtttgcatctaacaaacgtgtttggatgaaaaaacaaggtactaatgaagttaagtctgacatgagtatttttaatattccaagtgaagatctaaatacagttattggtcgttctaaagataaaaatggtacatcttgggtaggagagaatacaagagcaccatacgtaacagttattggagaatctgaagatggtttaacaggtcaaccagtgtacgttgcgctacttaaaggtacttttagcttggattcaattgaatttaaaacacgaggagaaaaagcagaagcaccagagccaacaaaattaactggtgactggatgaacagaaaagttgatgttgatggtactccacaaggtattgtatacgggtatcatgaaggtaaagaaggagaagcagaattcttcaaaaaagtattcgttggatacacggacagtgaagatcattcagaggattctgcaagttcgttacccagctaacccccaaaatgttgaagtagcagttaattcaaaatctgcaacagtttcagcagaataggggctttcaaaataaatcaaaggagaataatttatgactaaaactttaaaggtttataaaggagacgacgtcgtagcttctgaacaaggtgaaggcaaagtgtcagtaactttatctaatttagaagcggatacaacttatccaaaaggtacttaccaagtggcatgggaagaaaatggtaaagaatctagtaaagttgatgtacctcaattcaaaaccaatccaattctagtctcaggcgtatcatttacaccagaaactaaatcaattatggtaaataccgatgacaatgttgagccaaacattgcaccaagcacagcaacgaataaaatattgaaatatacaagtgaacatccagaatttgttactgtagatgaaaatacaggagcaattcacggtgtagctgaaggtacttcagtaatcactgctatgtctactgatggaagcgataagtcaggacaaatttcagtgacagtaacaaacggatagggatttaaggcgcagtatatctgcgtcttttttatttgaataaaaggagctaatacaatgattaaatttgaaattaaagatcgtaaaacaggaaaaacagagagctatacaaaagaagatgtaacaatgggcgaagcagaaaaatgctatgagtatttagaattagtaaatcaagagaataaaaaagaagcacctaacgcaacaaaaatgagacaaaaagagcgacagttattagtagatttatttaaagatgaaggattgactgaagaagatgttctgaacaagatgagtactaaaacttatacaaaagccttacaagatatatttcgagaaatcaatggtgaagatgaagaagattcagaaactgaaccagaagagatgggaaagacagaagaacaatctcaataaaagacattttatcgaacattaagaaaatacaacgtttctgtatggagcagtatgggtggacattaactgaagtcagaaaacagccgtatgtaaaacttttagaaatacttaatgaagagaataaagaagagactgaagaaaaacaaagtgaacaaaaagtcattacaggtacggatttaagaaaactttttggaagctagaaaggaggttaatatgaatgaaaaagtagaaggcatgaccttggagctgaaattagaccatttaggtgtccaagaaggcatgaaaggtttaaagcgacaattaggtgttgttaatagtgaaatgaaagctaatctgtcagcatttgataagtctgaaaaatcaatggaaaagtatcaggcgagaattaaggggttaaatgataagcttaaagttcaaaaaaagatgtattctcaagtagaagatgagcttaaacaagttaacgctaattaccaaaaagctaaatctagtgtaaaagatgttgagaaagcatatttaaagctagtagaagctaataaaaaagaaaaattagctcttgataaatctaaagaagccttaaaatcatcgaatacagaacttaaaaaagctgaaaatcaatataaacgtacaaatcaacgtaaacaagatgcgtatcaaaaacttaaacagttgagagatgcagaacaaaagcttaagaatagtaaccaagctactactgcacaactaaaaagagcaagtgacgcagtacagaagcagtccgttaagcataaagaacttgttgaacaatataaacaagaaggcaatcaagttcaaaaactaaaagtgcaaaatgacaatctttcaaaatcaaatgataaaattgaaagttcttacgctaaaactaatactaagttaaagcaaacagaaaaagaatttaatgatttaaacaatactattaagaatcatagtgctaatgtcgcaaaagctgaaacagctgttaataaagaaaaagctgctttaaataatttggagcgttcaatagataaagcttcatccgaaatgaagacttttaacaaagaacaaatgatagctcaaagtcatttcggcaaacttgctagtcaagcggatgtcatgtcaaagaaatttagttctattggagataaaatgacttccctgggacgtacgatgacgatgggcgtatctacaccgattactttagggttaggtgcagcattaaaaacaagtgcagactttgaaggccaaatgtctcgagttggagcgattgcgcaagcaagcagtaaagacttgaaaagcatgtctaatcaagcagttgacttaggagctaaaacaagtaaaagtgctaacgaagttgctaaaggtatggaagaattggcagctttaggctttaatgccaaacaaacaatggaggctatgccaggtgttatcagtgcagcagaagcaagtggtgcagaaatggctacaactgcaactgtaatggcttcagcgattaactctttcggtttaaaagcatctgatgcaaatcatgttgctgatttacttgcgagatcagcaaatgatagtgctgcagatattcagtacatgggagatgcattgaagtatgctggtactcctgcaaaagcattaggagtttcaatagaggacacttccgcagcaattgaagttttatctaactcaggtttagagggttctcaagcaggtactgccctaagagcttcatttatcaggctagctaatccaagtaaaaatacagctaaggaaatgaaaaaattaggtattcatttgtctgatgctaaaggtcaatttgttggcatgggtgaattgattagacagttccaagataatatgaaaggcatgacgagagaacaaaaactagctacagtggctacaatagttggtactgaagcagcaagtggatttttagccttgattgaagcgggaccagataaaattaatagctatagtaaatccttaaagaattccaatggcgaaagtaaaaaagcagcagatttgatgaaagataatctcaaaggcgctctggaacaattaggtggcgcttttgaatcattagcaatcgaagtcggtaaagatttaacgcctatgattagagcaggagcggaaggtttaacaaaattagttgatggatttacacatctccctggttgggttagaaaagcttcagtaggattagcactttttggtgcagcaattggacctgcagttcttgctggagggttattaatacgtacagttggaagtgctgctaaaggatatgcgtcattaaatagacgcattgctgaaaatacaatactttctaataccaattcaaaagcaatgaaatctttaggtcttcaaactttatttcttggtactactaccggaaaaacgtcaaaaggctttaaagggttagccggagctatgatgtttaatttaaaacctataaatgttttgaaaaattctgcaaagctagcaattttaccgttcaaacttttgaaaaacggtttaggattagccgcaaaatccttatttgcagtaagtggaggcgcaagatttgctggtgtagccttaaagtttttaacaggacctataggtgctacaataactgctattacaattgcctataaagtttttaaaaccgcatatgatcgtgtggaatggttcagaaacggtattaacggtttaggagaaactataaagttttttggtggcaaaattattggcggtgctgttaggaagctaggagagtttaaaaattatcttggaagtataggcaaaagcttcaaagaaaagttttcaaaggatatgaaagatggttataaatctttgagtgacgatgaccttctgaaagtaggagtcaacaagtttaaaggatttatgcaaaccatgggcacagcttctaaaaaagcatctgatactgtaaaagtgttggggaaaggtgtttcaaaagaaacagaaaaagctttagaaaaatacgtacactattctgaagagaacaacagaatcatggaaaaagtacgtttaaactcgggtcaaataacagaagacaaagcaaaaaaacttttgaaaattgaagcggatttatctaataaccttatagctgaaatagaaaaaagaaataaaaaggaactcgaaaaaactcaagaacttattgataagtatagtgcgttcgatgaacaagaaaagcaaaacattttaactagaactaaagaaaaaaatgatttgcgaattaaaaaagagcaagaactcaatcagaaaatcaaagaattgaaagaaaaagctttaagtgatggtcaaatttcagaaaatgaaagaaaagaaattgaaaagcttgaaaatcaaagacgtgacatcactgttaaagaactgagtaagactgaaaaagagcaagagcgtattttagtaagaatgcaaagaaacagaaatgcttattcaatagacgaagcgagcaaagcaattaaagaagcagaaaaagcaagaaaagcaagaaaaaaagaagtagacaagcaatatgaagatgatgtcattgctataaaaaataacgtcaacctttctaagtctgaaaaagataaattgttagctattgctgatcaaagacataaggatgaagtaagaaaggcaaaatctaaaaaagatgctgtagtagacgttgttaaaaagcaaaataaagatattgataaagagatggatttatccagtggtcgtgtatataagaatactgaaaagtggtggaatggccttaaaagttggtggtctaacttcagagaagaccaaaagaagaaaagtgataagtacgctaaagaacaagaagaaacagctcgtagaaacagagaaaatataaagaaatggtttggaaatgcttgggacggcgtaaaaactaaaactggtgaagcctttagtaaaatgggcagaaatgctaatcattttggcggcgaaatgaaaaaaatgtggagtggaatcaaaggaattccaagcaaattaagttcaggttggagctcagccaaaagttctgtaggatatcacactaaggctatagctaatagtactggtaaatggtttggaaaagcttggcaatctgttaaatcgactacaggaagtatttacaatcaaactaagcaaaagtattcagatgcctcagataaagcttgggcgcattcaaaatctatttggaaagggacatcaaaatggtttagcaatgcatataaaagtgcaaagggctggctaacggatatggctaataaatctcgcgcgaaatgggataatatttctagtacagcttggtcgaatgcaaaatccgtttggaaaggaacatcgaaatggtttagtaactcatacaaatctttaaaagattggactggggatatgtattcaagagcccacgatcgttttgatgcaatttcaagttcggcatggtctaacgctaaatcagtatttaatggttttagaaaatggctatccaaaacatatgattggattagagatattggtaaagacatgggaagagctgcggctgatttaggtaaaaatgttgctaataaagctattggcggtttgaatagcatgattggcggtattaataaaatatctaaagccattactgataaaaatctcatcaagccaatacctacattgtctactggtactttagcaggaaagggtgtagctaccgataattcgggagcattaacgcaaccgacatttgctgtattaaatgatagaggttctggaaacgccccaggtggtggagttcaagaagtaattcacagggctgacggaacattccatgcaccccaaggacgagatgtggttgttccactaggagttggggatagcgtaataaatgctaatgacactctgaagttacagcggatgggtgttttgccaaaattccatggtggtacgaaaaagaaaaaatggatggaacaagttactgaaaatcttggtaaaaaagcaggggacttcggttctaaagctaaaaacacagctcataatatcaaaaaaggtgcagaagaaatggttgaagccgcaggcgataaaatcaaagatggtgcatcttggttaggcgataaaatcggcgatgtgtgggattatgtacaacatccagggaaactagtaaataaagtaatgtcaggtttaaatattaattttgggggcggagctaacgctacagtaaaaattgctaaaggcgcgtactcattgctcaaaaagaaattagtagacaaagtaaaatcgtggtttgaagattttggtggtggaggcgatggaagctatctatttgaccatccaatttggcaaaggtttgggagctacacaggtggacttaactttaatggcggtcgtcactatggtatcgactttcaaatgcctactggaacgaacatttatgctgttaaaggcggtatagctgataaagtatggactgattacggtggcggtaattctatacaaattaagaccggtgctaatgaatggaactggtatatgcatttatctaagcaattagcaagacaaggccaacgtattaaagctggtcaactgatagggaaatccggtgctacaggtaatttcgttagaggagcacacttacatttccaattgatgcaagggtcacatccagggaatgatacagctaaagatccagaaaaatggttgaagtcacttaaaggtagtggcgttcgaagtggttcaggtgttaataaggctgcatctgcttgggcaggcgatatacgtcgtgcagcaaaacgaatgggtgttaatgttacttcgggtgatgtaggaaatattattagcttgattcaacacgaatcaggaggaaatgcaggtataactcaatctagtgcgcttagagacatcaacgttttacagggcaatccagcaaaaggattgcttcaatatatcccacaaacatttagacattatgctgttagaggtcacaacaatatatatagtggttacgatcagttattagcgttctttaacaacagatattggcgctcacagtttaacccaagaggtggttggtctccaagtggtccaagaagatatgcgaatggtggtttgattacaaagcatcaacttgctgaagtgggtgaaggagataaacaggagatggttatccctttaactagacgtaaacgagcaattcaattaactgaacaggttatgcgcatcatcggtatggatggcaagccaaataacatcactgtaaataatgatacttctacagttgaaaaattgttgaaacaaattgttatgttaagtgataaaggaaataaattaacagatgcattgattcaaactgtttcttctcaggataataacttaggttctaatgatgcaattagaggtttagaaaaaatattgtcaaaacaaagtgggcatagagcaaatgcaaataattatatgggaggtttgactaattaatgcaatcttttgtaaaaatcatagatggttacaaggaagaagtaataacagattttaatcagcttatatttttagatgcaagggctgaaagtccaaacaccaatgataacagtgtaactattaacggagtagatggtattttaccgggcgcaattagttttgcgcctttttcattagtattaaggtttggctatgatggtatagatgttatagatttaaatttatttgagcattggtttagatctgtgtttaatcgcagacatccttattatgttattacttctcaaatgcctggtgttaaatatgcagtgaatacagctaatgttacatctaatttaaaagatggttcttcaactgaaattgaagtaagtttaaatgtttataaagggtattctgaatcagttaattggaccgatagcgagttcttattcgactctaattggatgtttgaaaatggaattcctcttgatttcacacctaaatatactcatacatcaaatcaatttactatttggaacggttctactgatacgataaatccacgattcaagcacgatttgaaaatattaattaatttaaatgcgagtggaggatttgaactggttaactatacaacaggtgatatttttaagtacaacaaaagtatagataaaaacactgattttgttttagatggtgtgtatgcatatcgagatataaatagagtgggaattgatacaaataggggcattataacattagcgccaggtaaaaatgaatttaagattaaaggagacgtcagtgatattaaaactacatttaagtttccttttatttataggtaggtgatttaatggattatcatgatcatttatcagtaatggattttaatgaattgatttgtgaaaatttactagatgtagattatggttcttttaaagaatattatgaactgaatgaagctaggtacatcacctttacagtttatagaactactcataatagttttgtttttgatttattgatttgtgaaaacttcataatttatcatggtgaaaaatatacaattaagcagacagcgccaaaggttgaaggtgataaagtttttattgaagttacggcatatcacataatgtatgaatttcaaaatcactcagtggaatcaaataagcttgatgacgacagtagcgaaactggtaaaacgccagaatactctttagatgagtacttaagatatggatttgcaaatcaaaaaacgtcagtcaagatgacctataaaataattggagattttaaaagaaaaataccaattgatgaattaggtaataaaaatggcttagaatattgtaaagaagcagtagatttgtttggttgtattatttatccaaatgatacggagatatgtttttattctcctgaaacattttatcaaagaagcgagaaagtgattcgatatcaatataatactgatactgtatctgcaactgtcagtacattggaattaagaacagctataaaagtttttggaaaaaagtatacagctgaggaaaagaaaaattataatcctattagaacaactgacattaaatattcaaatggttttataaaagaaggtacttatcgtaccgcaacaattgggtctaaagctactattaactttgattgcaagtatggtaatgaaacagttagatttacaataaaaaagggctctcaaggtggaatatataagttgattttagacggcaagcaaattaagcaaatttcttgttttgctaagtcggttcagtctgaaacaatagatttaataaaaaatattgataaaggcaagcacgttttagaaatgatatttttaggagaagaccccaaaaatagaattgatatatcttcaaataaaaaagctaagccttgtatgtatgttggaactgaaaaatcaacagtcttaaatttaattgctgacaactcaggtcgcaatcaatacaaagcaattgttgactacgtcgcagatagtgcaaagcagtttgggattcgatatgctaatacgcaaacaaatgaagatatcgaaacacaggataagctgttagaatttgcaaaaaagcaaataaatgatactcctaagactgaattagatgttaattatataggttatgaaaaaatagagccaagagatagcgtattctttgttcatgaattaatgggatataacactgaattaaaggttgttaaacttgataggtcacatccatttgtaaacgcaatagatgaagtgtctttcagcaatgaaataaaggatatggtacaaattcaacaagcacttaacagacgagttattgcacaagataatagatataactatcaagcaaatcgtataaatcatttatacactagtactttgaattctcctttcgagacaatggatatagggagtgtattaatataatggcaacagaagaagttaaaatcaaagcgctacttgaaaacgataaacagtactttccagctacacattggaaagctataaatgggataccttatgcaggcagtagtgatattgatggattgcctcaagacggtatcatttcggtagatgataaaaataaattagataatttaaaaataggcgaagcaggaactattcaaaatagcattgtacagaaatccccaaacggtaaattgtggaaaataacagttgacgatagtgggaaacttggtacagtgctattttattagaaaggaaggtgcattatggaaaatttgtatttaataaaggatttgggagctttagcaggtcgagattatagagctaaggaaatacaaaacttacaaagaatagagcaatttgcgcttggcttgacaacagagtttaagttgcatcagaaagctaaaacaattcaacacttcgctgagcaaatttattataatggtagatcgcaagcagcagtaaacaaatctttacaaagtcaaattaacgcacttgttgtggcaccacgtaataacagtgctaatgagattgttcaagctcgagttaatgtaaacggcgaaacctttgacacattaaaagaacatttagacgattgggaaaccaaaactcaaattaataaagaggaaactataagagaattaaataagaccaaacaagaaattcttgatatcgagtatcgttttgaacctgataagcaagaatttttatttgtgacagaacttgcacctcttacaaatgcagtaatgcaatccttctggtttgataatagaacaggcatagtatacatgacacaagctagaaataatggctatatgctaagtcgtctaagacctaatggtcaatttatagacagctcattgattgtaggtgggggtcatggtacacataacggttatagatatattgatgatgagttatggatttatagttttatcttaaatggtaataatgagaatacattagttcgtttcaagtatacgcctaatgtggaaattagctatggcaagtatggtatgcaagatgtatttacaggacacccagaaaaaccctacatcacccctgtcataaatgaaaaagaaaataaaattctatacagaattgagagacctagaagtcagtgggaacttgaaaactcaatgaattatatagagataagaagtttagatgatgttgataaaaatattgataaagttttgcataaaatcagtatccctatgagactaacaaacgaaacccaaccaatgcagggtgtgacttttgatgaaaaatacttgtattggtatacaggagacagtaatccaaataatagaaactatttaacagctttcgatttagaaacaggagaagaagcgtatcaggttaatgctgactatggtggaacactagattcatttcctggcgaatttgcggaagcagaaggtttgcaaatatactatgacaaagatagtggtaaaaaagctttgatgctaggtgttactgtcggtggtgatggaaatagaacacatcgtattttcatgattgggcaaagaggtattttagaaatacttcactcaagaggcgttccttttatcatgagtgacacaggtggtagagttaaacctttaccaatgaggcctgataaacttaagaatcttgggatgttaacagagccaggtctttactatttatacactgatcatacagttcaaatcgatgatttcccattaccaagagaatggcgtgatgcaggttggttcttggaagttaagccaccacaaactggcggtgatgtaattcagatattgacgcgtaatagttatgcaaggaatatgatgacttttgaaagggttctttctggaagaactggagacatttcggactggaattatgtgcctaaaaatagtggtaaatgggagagagtaccttcattcatcacaaaaatgtcagatattaacatagtaggtatgtcgttttatttaactacggatgatacaaaacgttttacagattttccaactgaacgtaaaggggtagctggttggaacttatatgtagaagcttctaacacaggtggttttgttcataggctagttcgtaatagtgttacagcatcttgtgaaatattattgaagaactatgatagtaaaacaagttcagggccatggactttacacgaagggagaattataagttaatgagtaatttagagaaatctgtagctataaatttagaaaatacagcgcattatgaaaatatttcaaatctagatataacttttagaacaggagagagtgattcttctgttcttctttttaatatcattaaaaataatcaaccgttattactgagtgaagaaaatatcaaagcacgaatagcgattcgaggtaaaggagtaatggtagttgctccactagaaatattagatccatttaaaggtattttaaaatttcaattacctaatgatgtaattaaaagagatggaagttatcaagctcaagtttcggttgcagaattaggtaattcagacgtggtagttgtagagagaactatcacatttaacgttgaaaaaagtttgtttagcaagattccctctgaaacaaaactacactatattgttgagtttcaagaattagaaaaaactattatggatcgcgcgaaagcaatggacgaggctataaaaaatggtgaggattatgcgagtctgattgaaaaagctaaagaaaaaggtctatcagatattcaaatagcaaaatcttcaagtattgatgaattaaagcaacttgctaatagccgtatatctgatttggaaaataaagcgcaagcatattcaagaacattcgatgagcaaaagcgatatatggatgagaaacatgaagccttcaagcagtcagtgaatagtggtggtttagtcacaagtggttctacttcaaattggcaaaaagctaagattactaaagatgatggtaagataatgcagattactggatttgattttaataatccagaacaaagaataggtgattcaacccaatttatttatgtttcgcaagctataaattatccaagaggtgttagtactaacggtactgtcgaatatttagtagtaacttcagattacaagcgtatgacttatcgaccgaacggtacaaataaagtgtttgttaaaagaaaagaagcgggttcatggtctgagtggtcagaattagctattaatgattacaatacaccttttgaaactgttcaaagtgcccaatcaaaagctaatatggccgaaagtaacgctaaattatacgcagatgacaagtttaataaaaggtattcggttatttttgatggaacagcaaatggtgtgggctctacattgtacttaaatgagagtttagaccaatttattttattaattttttatgggacttttccaggtggtgactttacagagtttggcagtccttttggaggaggaaagatttcattgaatccctcaaatcttccagatggtgatggaaatggtggaggtgtttatgagtttggattaactaaatctagtcgtacatctttaacgatatcaaacgatgtctatttcgacttaggaagtcaaagaggctctggtgcgaacgcaaatagagggacaattaacaaaattataggagtgagaaaataatgcaaatattagttaacaagcgtaatgagataatttcatacgctatcattggtggctttgaagaaggtattgatattgaaaatttaccagaaaatttctctcaagtttttagacctaaagcctttaaatattcaaatggggaaatagtttttaacgaagattattcagaagaaaaagatgacttgcatcaacagattgacagtgaagaacaaaacacagtcgcttctgatgacatcttacgaaaaatggttgctagtatgcagaaacaagttgttcaaagtacaaagttatcgatgcaagttaataagcaaaatgcactaatggcaaaacaacttgtgacacttaataaaaaattagaagaggttaaaggagagactgaaaatgcttaaattaatttcaccaacattcgaagatattaaaacatggtatcaattgaaagaatatagtaaagaagatatagcgtggtatgtagatatggaagttatagataaagaggaatatgcaattattacaggagaaaagtatccagaaaatctagagtcataggttataatcttatggctttttaatttgaataaagtgggtggtgtaatgtttggatttaccaaacgacacgaacaagattggcgtttaacgcgattagaagaaaatgataagactatgtttgaaaaattcgacagaatagaagacagtctgagaacgcaagaaaaaatttatgacaagttagatagaaatttcgaagaactaaggcgtgacaaagaagaagatgaaaaaaataaagagaaaaatgctaaaaatattagagacatcaagatgtggattctaggattaatagggacgattctaagtacatttgttatagccttgttaaaaactatttttggcatttaaaggaggtgattaccatgcttaagggaattttaggatatagcttttggtcgtgtttctggtttagtaagtgtaagtaatagttaagagtcagtgcttcggcactggctttttattttggataaaaggagcaaacaaatggatgcaaaagtaataacaagatacatcgtattgatcttagcattagtaaatcaattcttagcgaataaaggtataagtccgataccagtagatgaagaaagtgtttcatcgattatcttaacagttgttgctttatatactacatataaagataatccaacatctcaagaagggaaatgggcgaatcaaaaattaaagaaatataaagctgaaagtaaatatagaaaagcaacaggacaagcacctattaaagaagtaatgacacctacgaatatgaacgacacaaatgatttagggtaggtggttgatatatgttaatgacaaaaaatcaagcagaaaaatggtttgacaattcattagggaaacaattcaacccagatggttggtatggatttcaatgttacgattacgcaaatatgttctttatgttagcgacaggcgaaaggctgcaaggtttatacgcttataatattccatttgataataaagcaaggattgaaaaatacgggcaaataattaaaaactatgatagctttttaccgcaaaagttggatattgtcgttttcccgtcaaagtatggtggcggagctggacatgttgaaattgttgagagcgcaaatttaaacactttcacatcatatgggcaaaattggaatggtaaaggttggacaaatggcgttgcgcaacctggttggggtcctgaaactgttacaagacatgttcattattacgatgacccaatgtattttattagattaaatttcccagataaagtaagtgttggagataaagctaaaaacgttattaagcaagcaactgccaaaaagcaagcagtaattaaacctaaaaaaattatgcttgtagccggtcatggttataacgatcctggagcagtaggaaacggaacaaatgaacgtgattttatccgtaaatatataacaccaaatatcgctaagtatttaagacatgcaggtcacgaagttgcattatatggtggctcaagtcaatcacaagatatgtatcaagatactgcttacggtgttaatgtaggaaataataaagattatggcttatattgggttaaatcacaggggtatgacattgttctagagattcatttagacgcagcaggagaaagtgcaagtggtgggcatgttatcatttcaagtcaattcaatgcagatactattgataaaagtatacaagatgttattaaaaataacttaggacaaataagaggtgtaacacctcgtaatgatttactgaacgttaatgtatcagcagaaataaatatcaattatcgtttatctgaattaggttttattactaataaaaaagatatggattggattaagaagaattatgacttgtattctaaattaatagctggtgcgattcatggtaagcctataggtggtttggtagctggtaatgctaaaacatcagctaaaaaccaaaaaaatccaccagtgccagcaggttatacacttgataaaaacaatgtaccgtataaaaaagagactggttattacacagttgccaatgttaaaggtaataacgtaagggacggctattcaactaattcaagaattacaggtgtattacctaataacgcaacaatcaaatatgacggcgcatattgcatcaatggctatagatggattacttatattgctaatagtggacaacgtcgttatatagcgacaggagaggtagacaaggcaggtaatagaataagtagttttggtaagtttagcacgatttagtatttacttagaataaaaattttgctacattaattatagggaatcttacagttattaaataactatttggatggatattaatattcctatacactttttaacatttctctcaagatttaaatgtagataacaggcaggtacttcggtacttgcctattttttatgttatagctagccttcgggctagttttttgttatgatgtgttacacatgcatcaactatttacatctatccttgttcacccaagcatgtcactggatgtttttttcttgcgatagagagcatagttttcatactactccccgtagtatatatgactttagcattcccgtataacagtttacggggtgctttttatgttatacttacttttatatagtaggagtgaactatatagccgggcagaggccatgtatctgactgttggtcccacaggagacatcttccttgtcatcactcgatacatatatcttaacaacatagaaatgttacattcgctacaaccgtatcttaatcgatacggttatatttattcccctacaaccaacaaaaccacagatcctattaatttaggattgtggttattttttgcgttttttcggggcaaaaaaagggcagattatttgaaaaagggcaaacgcttgtggaaaatctaaaaggttaaaaatgacaaaaaccttgatacaacagtgtttttggacgctcgtgtacgttagagaatgaccggtttaccatcttacaagggtgggatcatgtcgattttatcggtgtggatttcctagatttcaagcgtaaaggtgcagaactcgccaacttctatacaggtattataaatgacttgttgcgtgttgaagcaactgaaggtaaaggtacacaattgaaagcaagttaaattcattttcgtaatttaatatgctatgtatttcgtgctattaacatggcacagcagatataagtaacatcatagtgttgaatttcaaaatagttaagtgaaataaagcgcctgtctcattagcgaaaactaaagggacaggcgtatctgtttatgagcttaataaattgtatgaataatatggttgattgaataactgtttatcatgatgataaattgagtttttaaaaataatggtatattacgccattgttatagcatttaagaaatcaacaactttacgataaatagtgattgcttcgtcattaggtctacgatcaaaatcatgctcgtttttattcacgcgttcaaatgttgaatgtggaacatggttcatgatatgttcgctttcctcaacgggaacatcataatcgccattacaatgcgcaacgaacaccgggggaagtgttttaagttcatttggtgagatgttgtattttgaatcagtataatcagcaatgttaatcatattgatccactcacctgtaccacgtgcataaccgtagattaaaaaacgttgggcgatttgatcttgaataatcggtgttggtgaagtaagttgagcaagtactgtttcattcacactttgagctattttagcgtaatagctatttgccattttaaacggttcagtattgatgccactataaccataaaaatcaataacaccatcaatatctctgtctcgtgcaattaatagacttaaatatgcacctgatgatctgccaaaggtaaaaatagggcaattagaatattgtgattgaatcgcatcgaatgatgcgtagacatcctcaataatacaatcgagacttacttctggtaataaacgataacttagttgaattaaatcgtaatgttccgtaaggatatcgatatactgtggcgataaatcattggcttttccaaacattaaaccgccaccatgaatgtagacaatggcaccttttgttggttgatgcttcgctttaataattgtgtagggtaattcaaatgcatctttagtaattactttatctttaatttcagtcacgactatacagactccttatttttgaaattgatgtcattataacattgtcttaaatttctatgaaaaattatcttttgatgatgtgtcatgataattctgttctaattgacgtaaagcgtcacgggtatgcttctttagaccttccccataatccatcattttaacaatatctttaaaagcggcacgcggaatggctaaattttctaaatcttccatagaaaattcaaggtcaatatcttgtggtcgctgttcagcaagtttatgcacaaagtcaggttctgtgacaaaaggcgaagacatgccgaccatatctgcatgttgtaaagcatctaaagcagactctggagaattgatcccgccacttgcaattaaagggatgcgaccagctaaatgttcatagacaatttggttaactggccgaccgaaatgttcgcctggtgtacgcgacgtattttgataaatatgtcgaccccagctagcgattgctaaatattggatgtttgaaacgtccatgacccaatcgattaattgattgaactcgtcaatggtatatcctaaatcactacctctggtttcttctggcgttgctcgaaatcctaaaataaaattgtcaggtgcttctttatcaatcacttcttgtaccgcacgcataacttctaaacataatcttgcacggtttcttaatgtgtcggcaccgtaatggtctgtacgtttattcgaaaaagttgagaaaaatgtttgaatcagcaaacggcaatcgaaatttccacaccatcaaaacctgctttaatcgcgcgtaatgtagcatcgcgatactgctgaatgatgctattgattttctcatgagacatggcgataacatcgtgttcaatcggtgaatgcaacgtcatagggcttggtccatacacctttccaaaatttaaaattgcttgatttgaaaaacgaccagcatgcgctagctgaataatagcgaggctaccatgttgtttcatcgtagacgccatgttagttaatccagggatacaagcatcatgatcaatattaaagccgtattcaaacaattgaccataaggttcaatgtaagcagcgccggtgacttgcataccagctgaattagagcgacgtgcagcataagccaagtctgcttttgtaatatagccttcttttgttgatgcgtttacagtcattggtgataatacaaagcgattcgaaattttgatgccattaggtaagtggattgattgtaaaagtggtttgtatcggtacatactatgattccttttctattcaatattgttttcaaagtaccatggaaagaatgaataatcaatgatgaacagtcttgatagaatagaattggtacatggaaaacatttttaaaattgaactaatgaatggcatttgtaggtctgaaaatatgaatatgaaaaagaaaaatacaagcgaaaagatataaaagttaattgaaaaacgttatcatatacgtgggtatatgaagagggaatggtattaagaacgctaaaatgttatgtcggtttgacatgacaggataagtttggagatgacggattggttaaattaagcgtattagactatgccttaatagatgaaggtaaggatgcacaaaaggcattgcaggattcagtgacacttgcaaaattagcagatcgacttggctttaagcgaatttggtttacggaacatcataatgtaccagcgtttgcgtgtagtagtccagaacttttgatgatgcatacattggcgcagacaaatcacatacgagttggttctggtggtgtgatgctaccgcactatcgaccttataaaattgctgagcattttagaatgatggcagcgttatatccaaatcgtattgatttaggtattggtaataatccaggtactactatggtaaagcaagctttagatggaataaatcctacatatgatagttacgatgaatcgatttcgttattacgtgattatcttacaataaaggataagccaagtgcgcatacgttaggtgtccaaccacacattgatcattttccagaaatgtggttattaagtagtagcgcaacatctgctaaaataactgccgaactaggtatagggctttctgttggaacatttttgctaccagatataaatgcgatacatgcagcgaaggataacattgatatttacaaaaaacatttccaagcatcaacgattaaaatggacgcaaaggtgatggcatctgtatttgtcattgtagctgataacgaagcggaagtagcagcattacaacatgccttagatgtttggttattaggtaaattacaatttgcagaatttgaacattttccatcggtagacacagcgcaaaagtataagcttaatgatcgagacaaagagatgattcaagcacatcaagcacgtatcattgcaggtacacaagaacaggttaaagcgcaattagatgatttcattgctacgtttgaagttgatgaggtgttagtagcaccacttattccaggcattgaacagcgttgtaaaacattaaaattactcgcggaaatctatttgtagcattttaaatagaagagaaaggatgaagataagatgaaaaagttagccaattatttatgggtagaaaaagtaggagatttgtatgtgtttagtatgacacctgaattgcaagatgatattgggacagtaggttatgttgaattcgtgagtccagatgaagttaaagtggatgatgaaattgtgagtatcgaagcatcgaaaacggtcattgatgtgcaaacgccattgtcaggaacgattattgagcgaaatacaaaagcggaagaagaaccgacaattttaaactctgaaaaaccagaagaaaattggttgttcaaattggatgatgtcgataaagaagcattcctggcattaccggaggcttaaatggaaacgttaaaatcaaataaagcgagacttgaatatttaatcaatgatatgcgtcgagagagaaatgacaatgacgtattggtaatgccatcttcatttgaagatttgtgggaattatatcgaggtttagcaaatgtcagaccggcattacctgtaagtgatgaatatttagctgtacaagatgctatgttaagtgatttgaatcgtcaacatgttacggatttgaaggatttgaagccaataaaaggtgacaatatctttgtttggcaaggtgatatcacgacgttaaaaatcgatgctattgttaatgctgcaaatagtcgttttctaggatgtatgcaagctaatcatgactgcattgataatattattcatacaaaagcgggtgttcaagttcgacttgattgtgcagaaatcattcgacaacaagggcgcaatgaaggtgtaggtaaagccaaaataacacgtggatataatttgccagcaaagtatataattcatacggttggtccgcaaatacgtcgattgcctgtttcaaagatgaatcaggacttgttagctaaatgctatttgagttgtcttaagcttgctgatcaacatagtttaaatcatgtcgctttttgctgtatatctacaggtgtatttgcttttcctcaagatgaagcagcagaaattgctgttcgaacagtagaaagctatctcaaagaaacaaattcaacattgaaagtcgtgttcaatgtatttacagataaggatttacaactgtataaggaggcatttaagcgtgatgcagagtagtaaatggaatgcaatgtctcttttaatggatgacaagacaaagcaggctgaagtattgcgtactgcgattgatgaagcagatgcgatagtgattggaattggtgcaggcatgtctgcatctgacggatttacatatgtaggagagcgttttacggaaaatttcccagattttattgaaaaatatcgcttctttgatatgttgcaagcgagtttacatccttatggcagttggcaagagtattgggcgtttgagagtcgttttattacattaaactatttagatcaacctgtaggtcagtcttacctcgctttaaaatccttaatggaaggtaaacattaccatatcataactacgaatgcagacaatgctttcgatgctgctgaatatgatatgacgcatgtatttcatatataaggggagtatatactgcaacagtgtagtcagcattgtcatgctcaaacgtatcgcaatgatgatttaattagtaaaatggttgttgcgcaacaagatatgcttataccttgggagatgattccaagatgtccaaaatgtgatgccccaatggaagtgaataaacgtaaagcggaagttggcatggttgaagattcagcatttcatgcgcaactacaacgttataatgcttttctagagcaacatcaagatgataaagtgttgtatttggaaattggaattggttatactacaccacaatttgtgaagcatccttttcagcgtatgacacgtaaaaatgaaaatgcactttatatgacaatgaataaaaaggcatatcgcattccgaattcaattcaagaacgtaccatacatttaactgaggatatctcaacattgattacagcagcactccggaacgacagcacaacgaaaaataacaacattggagagacagaagatgtacttaatagaaccgattagaaatggagaatatattactgatggtgcgattgcactcgctatgcaagtttatgttaaccagcatatctttttagatgaagatattttattcccttattattgtgatccaaaagtggaaattggacgttttcaaaatactgctatagaagtgaatcaagattatatagataaacacagtattcaagtagttcgccgagatactggtggtggcgctgtgtatgttgataaaggtgccgttaatatgtgttgtattttagagcaagacacttcaatttatggtgattttcaacgattttatcagccagctataaaggcgttgcatacattaggtgcaacagatgtgatacaaagcggtagaaatgatttaacattgaatggtaaaaaagtgtcaggcgccgcaatgacattattgaacaatcgtatttatggcggttattcgctattacttgatgttaattatgaagcaatggatgaagtgttaaagcctaatcgcaaaaagattgcatcgaaagggattaaatctgtgcgcgcacgtgttggtcatcttagagaagcactggatgaaaagtatcgtgatataaccattgaagaatttaaagatttaatggtgacgcagattttgggaatcgatgacattaaagaggcaaaacgatacgaattatctgatgcagattgggaagcgattcaagaattggcgcgcaaaaagtataaaaattgggattggaattatgggaagtcacctaaatatgaatataatcgaagtgaaagattatcatcaggtactgtagatattaccatttctgttgaacaaaatcgtattgcagattgtagaatttttggtgatttctttggacaaggtgatataaaagatgtggaacaagcattacaaggaacaaaaatgacaagagaagatttaacgcatcagttaaagcaattagacatcgtttattattttggtaatgttacggtagaatcattggttgagatgattttaagttaatattggtattttatgtatgctgaatcattggaagtgtttgcttgctcttgaaaaggtgacaatagtgtttgatgaaggttgaacatatgagtggaaattattgcctttaactattcaaagtatgatatatatggtttttgtttctaaatgattgggtatttgaaaatagatgagtttaatattttaaggaatataatgatgtttgcttttataattcatatagaatattaagcaatataagtctgttgatatatacaaaaatataatgactgctataatgaataatcaatagacacaaagaggagattatgtgatgaataataaagtattagtgaccggtggtacagggtttgttggtatgcgaataatttcacgattattagaacaaggttatgaggtacaaacgacgatacgtgatttaagtaaagctgataaagtaattaaaacgatgcaagacaatggcattcccacagagcgattaatgtttgtcgaagcagatttatcacaagatgaacattgggatgaagcaatgaaagattgtaaatatgtgttgagtgtggcatctccggtgtttttcggtaaaacagacgatgcagaagtgatggcgaagcctgccattgaaggcatacaacgtattttaagagctgcagaacatgctggcgtgaagcgtgtggtgatgactgcaaactttggtgcagttggttttagtaataaagataaaaattcaatcacaaatgaaagtcattggacaaatgaagatgaaccaggcttatcagtatatgaaaaatcaaaattgttagctgaaaaagcagcgtgggattttgttgagaatgaaaatacgacagtagaatttgccacaatcaatccagttgcaatttttggaccatcattagatgcacatgtttcaggaagctttcatttattagaaaatttattgaatggttcaatgaaacgtgtacctcaaattccattaaatgttgttgatgtgagagatgtagcagaactacacattttggcaatgaaaaatgaacaggctaatggcaagcgatttattgcgacggctgatggacaaattaatttgttggaaattgcaaaattaattaaagaaaagagacctgaaatagctcaaaaagtttctactaaaaaattatcagactttattttgagtctaggtgctaaatttaatcatcaagctaaagaaggtaaacttttattagatatgaatcgaaatgtaagtaacgaacgtgcaaaaacacttcttggttgggaaccgattgcgacacaagaagaagcaattttagcagcaattgatagtatggctaaatttcatttaatataatacaaaaacaccgtctataagtaagtggctttcctcttgataaaaggggcattcactcaatatgtgacggtgttttatatttttacgttaacactattactgtggcttttgacgaccttttaataaaattgctgtcgcacctacgataataataaatagaatcgcaccaaataatcccatatattttactgcgttaccgaacacgataccgacagctaaaaagtctgtatctgagaatgttgttgcagcaccacctaattcgcctaaaaatggcaagaataataatggtaaaaacgtgattaggataccatttagagcggcgccagcaacagcacctttaataccgcctcttgcattaccgaatacagcagccgttgcacctaagaagaagtgtgcaactacgccaggtaaaatgacgacgccaccaaataagaataagataaacataccgatgacacctgtaataaagctgacaaagaatccaattagtactgcattttgtgcataagggaacacaatagggcagtctaatgcaggtttagaatttggtacaagcttttcagaaatccctttaaatgctgggacgatttcagctaagattaagcgaacgcccgttaaaataataaatacaccagcagcaaatgtcacaccttgaattaatgaaatgacaataaagttttgaccatcactaatagattcgtgtacataactaacacccgcaaataagcatgcgatgaagtaaagtaatgccatcgtaatcgagatactaattgtactttctcgtaagaaacttaagccttttggaaatttaatctcttccgttgatttagacttccctttgaataattgacctacagcacctgcggcaaagtaactgattgagccaaaatgacctaacgctacttgatcattccctgtaatttttcgcatcgtaggttggagtaatgcaggtaagactgccatgattaatcctaatacgagtgcgccgataacaatcgttagccagcctttaatatgactgactgttaaaatgattgctaaaaacgcagccatgtaaaatgtatgatgacctgttaaaaagatatattttaaattagtgaagcgggcaattaaaatattaacaatcatgccacagaccatgatgagtgcagctgttgttccaaaatcttttaaggctagtgagacgatagcttcgttgttaggtacgataccttgcacaccgaatgcgtgttggaatattttgccgaatggctcaagagatcgaacgacgacatcagcacctgcacttaaaattaagaagcctaatatcgttttaatggttcctgaagtgattgttgcggcaggttttttctgaacgattaaacctataaaggcaatcagtgcaacaagaatggctggttgacttaaaatatcgactataaaattaaggattgcttgcataggtcgtacctcctttaaatcatgttaagttgttgtaatttttctgcgagcttttgttgtaattcagctttgtctaaaatattatcaagaactaagacatcccctagacgttcggcattttcagctaaatctctaccacaaataaacaagtcagccatctctggacttgctgtcataatgtcactatgttcaacttcgatatcagatggtgcattaagttgcctaagtgcttcttgtgcgttcatttctaccataaaactacttcctaaaccgtggccacatactactaaaattttcatattaatcatgctcctttaaaatgtttttaatgtcttgtgcgtttgttgcagttaatagttgctggactgtttggttatcgcccagtacggttgctaaattttgtaatacagataagtgtgaatgattgtcgatggcactcaatacaaaaatgagagatgcgtagtgatcttcatcacaaaatgccacatgttgattcaactttaatagacttaaaccaacttgatgtacgtcattgttcggtcttgcatgtgcaattgcaatttcaggtgcgataacgatataaggtccaagttcattaacgctatcaatcattgcttgaacatagccttgttcaataatttgttcttgtagtaatggctgagaagctatagttatagcttcagtccaatcatttacttgttcttttacaatgatgcgtgttgttgacaaaatgtctaatgacacgttattaaacctcctttgtcatagttaaagcaatgtgttgtttaattttaaaaatattcccatctaagaaatcttgtcgatataagtcgttgcttaagcattcgcttaactgtcccaatgcctttaaatgtgcattggggtggtccgttgctaatgtaattacaaggtgaacgggatcgttagctttactaccaaaaataatcccttcagtgaaataagttagtgcgaaacctacaccattttgtacataatcagtaccagcgtgaataagtgcaatatgtggactaatgaccatatatgacccgaattgttcaaattgttttaaaattgcagctgtataatttgaattgacaatgccatcattgattaaaggttgcacagccactgtaattgccgattcaattgataatggttgtttatttataatgatgcgatgttcaggtaataaatctgcgagtgacttgccatcagttgccattttcatgactcgttgttctcttgcgtcattgataatttgattcaatttttgacgagattgctgattgataaatggatcgacatgaataactggtacagctgatatttcacaaggtactgttgaaatgacataatcaatgttatcttgcaataatcgactttcttccaattgataaatggaataggcatcccaaatgtgaaactcaggatacaggtgatttagttttgattttaaaagttgcgacgtgcctataccagaaccacatagtaagacaaccttaatcattgattgtttatgtgttgcaacacgctctatacttgatgcgaaatgaattgtaatgtatgttaattcatcttcgttgaagcgaatagcagcatcttgttcaattgggctaatatgcttgctaacggcttcaatgatttgaggatagcgacgcataacttcttgcctcaaaggattaggttgtagcatatcgtatttaatacgatgtatagctggtttgatatgtgtgatcagactggtatgcaacttgttgtcttttgacatatcaatgcctaattcttggctaacacaagtgatcaattcatgtatattttgcgataaatcatggtattcaaaggtaattgaagatgctgtatgttcggtcattttagagcctagtaaatgtaacgtgataaagataatttcagactctggaaatgtgacattacaactgcgttctaagttttctatcatttttgaagcaatagcatactgattagtatgtcgccatttatcaatttcattgataggtatatcgaacgaaaaattttcatttaaacgctgaatggcaatgagtatatgatagattaagccatcgatagccgactgaactaaatgataattttcactatttaatgttttaataatggcacggcgaaccaatgcgatagattctgaattaaagatatcagcctctataaaaggtgcagcttgtttcatatattgatgtataaagtgtgcatacgctttacgataatgatcttcctcaccaataatattgaatcctttattgtggacataatttaactttaaatggtattgatctagttgggcttgaatcattttaatatcatctgcaattgtccgacgcgaaacattaacatcttgtgcaagttgctttgttgaaacaggatcagttgtttcgaataactttaaagcgatatgtgtgagtcgctcatcttttgaaaaatgaatttgattcgttagattgtgctctaattcatttaatatcgttgtgttagctgttgttactttgatgcctgcagctttattacggctgacttggtaatgataagtttcagcatattgctcaatatatgctatatcatattgaatggtacgaggtgatacaccaagttgattagcaatggtattgattggaataaacgtttgctcatgaattaaaagatacaaaatttcgatttgtctataacttaacaacgtaatatcctcctatttgtaattgtaagcgatttctcaaaaacgtagatatgcaatctctttcatattttaatccgaaaaattgcatatcaaaatgtttatggcgcaagattttataggaacttttaaaataaattagatattcatgttgacaatttaaaaatgtcgcagtatatttagttagacatctaacgaaatggtggtgcaataaatggaattcacttattcgtatttatttagaatgattagtcatgagatgaaacaaaaggctgatcaaaagttagagcaatttgatattacaaatgagcaaggtcatacgttaggttatctttatgcacatcaacaagatgggctgacacaaaatgatattgctaaagcattacaacgaacaggtccaactgtcagtaatttattaaggaaccttgaacgtaaaaagctgatctatcgctatgtcgatgcacaggatacgagaagaaagaatataggactgactacctctgggattaaacttgtagaagcattcacttcgatatttgatgaaatggagcaaacactcgtatcgcagttatctgaagaagaaaatgaacaaatgaaagcaaacttaatgaaaatgttatctagtttacaataaatggtaagcgtgactggtagaaatcagtcactttatctttaatgttatagttagatatctaattgttagtaagctaattattaaaaaagacaaggagtattgaacaatgaaagacgaacaattatattattttgagaaatcgccagtatttaaagcgatgatgcatttctcattgccaatgatgatagggactttattaagcgttatttatggcatattaaatatttactttataggatttttagaagatagccacatgatttctgctatctcactaacactgccagtatttgctatcttaatggggttgggtaatttatttggcgttggtgcaggaacttatatttcacgtttattaggtgcgaaagactatagtaagagtaaatttgtaagtagtttctctatttatggtggtattgcactaggacttatcgtaattttagttgctttaccattcagtgatcaaatcgcagcaattttaggagcgagaggtgaaacgttagctttaacaagtaattatttgaaagtaatgtttttaagtgcaccttttgtaattttgttcttcatattagaacaatttgcacgtgcaattggggcaccaatgatttctatgattggtatgttagctagtgtaggcttaaatattattttagatccaattttaatttttggttttgatttaaacgttgttggtgcagctttgggtactgcaatcagtaatgttgctgctgctttgttctttatcgtttattttatgaaaaatagtgacgttgtgtcagttaatattaaacttgcgaaacctaataaagaaatgctttctgaaatctttaaaatcggtattcctgcatttttaatgagtatcttaatgggattcacaggattagttttaaatttatttttagcacattatggaaacttcgcgattgcaagttatggtatctcatttagacttgtgcaatttccagaacttattatcatgggattatgtgaaggtgttgtaccactaattgcatataactttatgtcaaataaaggtcgtatgaaagacgttatcaaagcagttatcatgtctatcggcgttatctttgttgtatgtatgattgctgtatttacaattggacatcatatggtcggactatttactactgatcaagccattgttgagatggcgacatttattttgaaagtaacaatgacatcattattattaaatggtataggtttcttgtttactggtatgcttcaagcaactggtcaaggtcgcggtgctacaattatggccattttacaaggtgtggttatcattccagtactatttattatgaatgctttgtttggactaacaggtgtcatttggtcattattaattgctgagtcactttgtgctttagcagcaatgttaatcgtctatttattacgtgatcgtttgacagttgatacatctgaattaatagaaggttaaatatttcgtacacttctgactgagtatatttcggtcggaagtgtatttttcgaaaaaataaatatatgatacgattatgaaaaaataaagtgagattggcatatgtataaatctaaaatactgttgaaatatatttttagtgaggaatcagaagttaaagatttaactgaagaaaaatataatcaagattacgaagcattaacatttagctttaaagaggaaacatatcaaagtaggttagctaagaaaacaccgactaaagcagggtattttgttacatgttggacaaaagacgagaacaattgtaatcaaccatactcaaaagaggcatttgcagattacttaatgattatagttattgatgaagaattaagcggttatttcttatttcctagggaattattggtagaaaaaggcatcttaactacatttgagcataaaggtaaaatggcttttagagtgtatcctaagtggtgtaatcaattgaataaaacagcagggcaaacacaaaagtggcaatgtaaatatttttttgaatactaataaaaagtcatatggttgaacttataagagatgaatatatcatctttcgataagataaccatatgactttattttttatcatttaatgatgaacggtttcttgtcctactttattccaagtgaggataaagctcaacattgcaaacacactgattgctgttaataaaataaaaccgacatcccatccgaatttatcaactacagcacctaagacgatgttggccattacagcaccaaacagataaccaaataatcctgttaatccagctgctgtgccagctgcttttttaggaacataatctaatgcttgtaaaccaattaacataactggtccatatattaagaaaccaatggcaattaatgagacattgtctaaccaagcattgcctggaggatttaaccaataaattaatacaaatactgtgacacctaacataaagaagaaacctgcaggtccacggcgacctttgaataatttatcagaaatgtaaccacataataatgtaccaggaattccagcccattcgtataagaagtatgcccaacctgatgcttttaagtcgaaatgtttttcttcacttaagtagactggcgcccaatcaagtacaccataacgcacgaaataaacaaatatatttgcgaaggcaattgcccatacccatttattgttcagtacatatttaaataaaatttcttttgtagttaattctgtttctaatgttttcttatcgcttgtagcaaagtcatttttataaatttcgattggaggtaaaccttgagattgaggtgtgtctctaatcaatacgtatgaaattgcggcaatgataagtgctaagagtgcagggtaaatgaatacaccttcgaaaccttttaaataaccaaagttgataaatgctgttgttgtaataccccaagcagcaataggagccataatacctccaccaacattatgcgcaacgttccaaagggcagtcttacttccgcgttcacttacactaaaccagtgaacgagaacacggcctgaaggtggccagcccataccttgaaaccatccatttaagaataataggacaaacataataccgatacctgatgtaaagaacggtacaaatcccattaacaaattgacgatagcagtgagtactaatccaagaactaagaatatccgagcattgctccgatcacttacagtacccataaagaacttactaaatccatatgcgatggaaacagcagaaagtgcaaaacctagttccgcttttgtaaaaccttgctcttgcaatgccggcatcgctaatgaaaagtttttacgtaataaatagtacccagcgtaaccgatgaaaataccaagaaatacttggagacgtaatcgtttataggtatcatctatctgattttctggcaaaggcttaatatgctttgcaggtttaagaatattcataaaatcctccttaatatgtatttatatgcattttgtgcgataaacttatattagacatgtatgaaagcgttgtcaatatacttttgtgaaatcttgtagatttagttattgaagtattttataaaaatttagggaaaataaatttccacacataaatttataattatgcaattattatgtcgttatacatactagctgtgtatctacgaatgagtgcaagcatatttttatttgcagaaaaggggtaaatggcatatagctatcttttttatgtaagttggtataaaatttatactaataggagggatagtatgaatatagtagggcatcatcacatatccatgtatacaaaagatgcaaaacgtaataaggatttttacacaaatgtccttggattacgattggttgaaaagtcggttaatcaagacaatccttcaatgtatcatttgttttatggggacgaagtaggtacagccggaacaattttaagcttttttgaaattcccaatgcgggtcataagcagccaggtactgaaacgatttatcgattttcattattagtaccaaatcaagcggcacttcattattttgaaaaacgtcttgagaataatggtattaagtctgaacgtttgtactatcttagacgagaaggtgttgtctttaaagatgaagacgacttagaaatcatactgcttgttaatgatagttttgaagtaccacatcaatggcaacataacgcttatagtgaaatacctcaagcatatcaaattttaggaatagggccagtagaattaagagttagaaatgcagcgcgtacggtagaatttttggaaaatgtcttaggttatcgtaaaagagataataaatcattcgatgtgctgacattagcaccacaaggtttatattcggattttgtagttattgagcaacagggacaacgtgaaagacctggacgaggttatatccatcatattgcagttaatacaccaaaaatgagtgacttagatgcaatttacaagaaattacaacaacaaccacaaagtaattcaggtataattgatcgctatttctttaaatcattatactatcgccataattcaattatgtatgaatttgcgactgaagcgcctggatttactattgatacacctgttgaacaattaggaagtcaattgaacttgcctgactttttagaagcagaacgtgaacaaattgaaagtaagttacacgaaatataaaggagaatgtttaatggcaaaattagaaatggataaaaatacgcctcttgagtttggtttgtattccttaggtgatcatttattgaatccatttaaaggtgaaaaagttagttatgagcaacgtattaatgaaattattgaagcaagtaaattagcagatgaagcaggtattgatgtttttgcagttggtgaaagtcatcaggagcattttacaacacaggcacatacggttgtgttaggtgcaattgcccaagcgacaaagcatattaaagtttcaagttcttcaacgattattagtgcaacagatcctgtaagagtatttgaagacttcgcgacattagatttgatttctcatggtagagccgaaattgtggctggtagagcatcaagaacaggtatttttgacttgtttggctatgatttaaaagactatgatgaattgtttgaagaaaaattaggtttacttttagagttaaataaaactgagcgtattacttggtctggaaaatatcgtccagaacttagaaatatgaaaatattcccaagaccaatcgataatacattgccaatatggcgtgctgttggtggtccacctgcaagtgctatcaaagcgggaaaacaaggtgtgccaatgatgattacaacccttggtggcccagcaatgaactttaaaggttctatagatgcttatcgtcaagtagcaactgaagcaggtttcgatgcttcgcccaagtctttaccagtaagtacagcgagtctgttttatacagctgaaacaactcaggatgctatgagagaattttatccacatttgaatacagggatgtcatttattcgtggcgttggttatccgaaacagcaatttgctaattcaccagattatagagaagcgctaatggttggaagcccgcaacaaattattgaaaagattttgtatcaacacgagttgtatggtcatcaacgttttatggcacagcttgattttggcggtgtgccatttgaaaatgttatgaagaatattgagttaattggtaacgacattataccggcgattaaaaagcatttatcaaaataggaggggcgtcatcatgaatattgtattattgtcaggttccacagtaggttctaaaacgagaattgctatggatgatttaaaaaatgaactagaagtcatcaatgagggacatcaaatagagttgatggatttacgagaacttgaattagaatttagcgttggaaagaattatctagatactacaggagatgtatataaattaacgacgtcgttaatgcaggctgatgtgatttttattggttttccaatttttcaagcttccatccctggtgctttgaaaaatgtatttgatttacttccagtcaatgcgtttcgtgacaaggtaataggacttgtagcgacagcaggttctagtaaacattatttaattcctgaaatgcatttaaaaccaatattgagttacatgaaagcacatacgatgcaaacgtatgtattcattgaagagaaagacttttcaaatcaacaaattgtcaatgatgatgttgtatttcgtttaaaagcgttggcacaatccacaatgcgaactgccaaagtacaacaacaagtgcttgaagaagaaaataaccaatacgacttttaaagtataaaaataagacgctcggcacactaaatttgtaagtgtttgagcgtcttttcatattaactatatagccagtgaacgacgataaaggcaagtgatgacaagcatattgaggtaataatgattgtcataagcggtttaagtgcgcgatttttaagatctttaaatgcaacatttaaccctaaagcaaccatggccattaataagcaaatggttgatacagtatttaaaatatttagcaatgctgacgggatagttacatatgtattcactaaggccataatgacaaatccaattaaaaagtatggaatgcttattcgacccttgctagatgattctgatgaacggaagcgcataattaaaataagtacgatggttaatggaatcagtaagaatactctaccaagtttaccaagaagtgcgattttaagtgcatcactaccaccaaagccaccagctaagacaacgtgtgcaatttcatgaagactaacgccagaccaagcgccataaacatttgtcgtcattgaaaagatagcgtagatagctgtatatataagtgaaaatatcgtaccaatcaatgcgatgataccgatactaatagctgtatctttttcacgtgatttgaatattggagctactgcagcaatagcggcagcaccacaaacgcctgtacctacacctagtaataatgcgatgtttttgtcaccatgcaacagtttgttgacaaagagcatcattacaatactgaaaataacgacacctacatcgatggctaatagtctactaccttgaccgataatatcgaatatattgagtttaagtccatataggatgattgcaaatcttaataaatatttagatgaaaacgtaatacctgagctatattgttcaggatatcctctaaagtgacgatatagaatagcgattaatatcgcgatagttaatgcgccaaccttatctaagattggtaatttagctgctaaaaagctaaataatgcgactataaatgttaatgaaagtccaatcataaaatgcttatttttcaatgatgccatgagcagtgcctcctttaatagcattttagcactgttttgtcgtatttttaaatataaatttggaatgaataataaagtagtgattaaattaagttgtgtgataggtatcaagggcatcaaccaaagtaataatcactacaacgcttattggcggggccccaacaaagaagctgacgaaaagtcagcttacaataatgtgcaagttggggtgcggggcccaacaaagagaaattggatccgtaatttctacagacaatgcaagttggcggggccccaacatagagaatttcgaaaagaaattctacaggcaatgcaagttggggaagaacaacaaatttaagatacaaggcgtaatattaatatgttattattatgataatttacagaattatatgaaaaatgaatgagggtgtgatggtatgtttggaatgaaagtgaatgaacaaataacattaaaaattttagaagtccatgacacagaagcacttttcaatttagtcaatcgttcaagaaattcacttagggaatggttaccttgggtagatgcaactgagcaatcatcagatacgcgtgcgtttattaaaagagggcttttgcaatttgctgatggtaatggatttcagtgtggcatttggtatggaggaacgctagttggtgtcatcggtttgcatgaaattaatcacatgcacagaaaaacttcattagggtattatttagataaacaatatgagggtcatgggattatgacacaagcagttgaggcattgataaagtattgcttcgatgagattgacttaaaccgaattgagattagtgtcgcagttaataatgaaaaaagccaagctattcctgaaaggctgggatttactagagaaggtatgttacgtgacaatgaattactaaatggtatttattcatcgagttacatctatagtttattaaaatcagaatttaatgaaggatgataaaacagactacaaaagagtaatgacttacatataagtgttactcttttatttatttttaaagaaaaaaggttgttgacagtattattttataacaatataatgattttgataattattatcaactagataatgttcatgggaggatgccttaaaatcatcattttaagagccacgtattatcttggcatttagggagtgtgagatagtacgaatgagggcatgtctatggggataatagaatttctataatgaggtgtcaaaatgaaaaagttaacaacgctattattagcatcaacgttattaattgctgcatgtgggaacgacgatagtaagaaggatgattcaaaggcatcgaaaaaagatgatggtgttaaagcagaattaaaacaagcaacaaaagcatatgataaatatactgatgaacagttaaatgaatttttaaaaggtacagaaaaatttgttaacgcgattgaaaataatgatatggcccaagcaaaagcgttatatccaaaggttcgtatgtattatgaacgctctgagccggttgcagaagcatttggagatttagatcctaaaattgatgcacgtcttgcagatatgaaagaagagaaaaaggaaaaagaatggtcaggatatcataagattgaaaaagcattatacgaagataagaaaattgatgatgtgactaaaaaagatgcacaacaattattgaaagatgcaaaagaattgcatgccaaagctgatacattagatatcacaccaaaattaatgttacaaggttctgttgacctattaaatgaagttgcaacttctaaaatcacaggtgaagaagaaatttattcacatacagatttatatgattttaaagcgaacgttgaaggcgcacaaaaaatttatgacttatttaaacctattttagagaaaaaagataaaaagttaagtgatgatattcaaatgaacttcgataaagtgaataaattattggataaatataaagataacaacggcggttatgagtcatttgaaaaagtatcgaagaaagaccgtaaagcatttgcggatgctgttaatgcattaggagagccactaagtaaaatggctgtgattactgaatgacaaattatgaacaagttaacgatagtacgcaattttcaagacgtacatttttgaaaatgttaggtattggcggtgccggtgttgcaattggcgcaagtggtgttggaagcatgtggtctttcaaatcaatgttcaatacaccagaagatccggaaaaagatgcgtatgaattctatggtaaagtacaaccaggcattaccacaccgacgcaaaaaacatgtaaattcgttgcattagatttgaaatcaaaagatcgagatgcgattaaagcaatgtttaagaaatggacggttatggctgatcgtatgatggatggagatacagttggcaaggccagtaacaatcctttaatgccaccagtagatactggtgaatcgattggattaggtgcaagcaagttaacgattacctttggaattagcaagtctttgatgaagaaaattgggttatctagtaaaattcccgatgcctttaaagatttaccgcattttccgaatgatcagttactagacgattacagcgatggcgatattatgattcaagcatgctcaaatgattcgcaagtgtcttttcatgcggttcataatttagttcgtccatttcgagatattgttaaggtgcgttgggcgcaatctggttttatctctgctaaaggtaaggaaacgccaaggaatttaatggcatttaaagatggaacaattaatcctaggaagaataatcaacttaaagattatgtgtttattgatgatggatgggcgaagcatggaacttattgtgttgtcagacgtatccaaatacacattgaaacgtgggatcgtactgcactggaagaacaagaggcaacatttggtcggaaacgacatagtggtgcgccgttaacaggcgggaaagaatttgatgaaattgacttaaaagcgaaagatagtcatggcgaatatattattgataaagatgcccatacgagactagcgaaagaagctaatacgtcaattttacgtagagcctttaattatgtggatggtactgatgatcgtacaggtaacttcgaaacaggcttgttgttcattgcttttcaaaaagcgacccaacaatttatcgatattcaaaataatttaggcagtaatgataaattaaacgaatacattacacatagaggttctgcttcatttttagtattaccaggtgttagtaagggaggatacctcggtgaaacattatttgactaaaattatagtaatgctaattactgctgctatggtgtgtaactttgggttattgaaaagtcaggcagcagaacaacaaagtattagtgatgtatatagtgtgataacggatgcgaaatctgcactttctaataattcgatatcgaatgacaataagcagaaagcaattgagcaagtggtaagtgcagttaagaaattatcgcttgaagataatagtgaaggtaatgctgtcaaatcagatgtgagaaagcttgaagatgcaaaagcgaatgatgatcaaaaagatacactttcgcaattaacgaagtcattaattgcttatgaagagaaattggctagtaaagatgcgggttctaaaattaaactattgcaacagcaagtcgatgccaaagatgcagcgatgacaaaagcgattaaagacaaaaataaagcggaattagaatctttgaacaatagtttgaatcagatttggactagtaatgaaacagtgattcgcaattatgacgcaaatcaatatggacaaattgaagtcgcattattacaacttagaattgcaattcataagtcaccattagatacgacaaaagtgtcacatgcttggacaactttcaaatcaaatattgatcatgtcgataagaaaagtggtacgtctgcaaatgatcaataccatgtatcacaattaaatgatgagttagagaaggcgattaaagctatcgacaacaatcaattgtcggatgctgatactgcgcttacacattttatagaaatttggccatatgttgaaggtcaaattcaaactaaagatggtgctttgtatacgaaaattgaagataaaataccatattatcaaagtgtattagacgaacataataaagcacatgtgaaagatggtttagtaggtttaaataatcaaattaaagaggttgttggccatagttatagcttcgtcgatgtgatgattatctttttacgtgaaggtctagaagtgttattaattgtaatgacattgactactatgacgcgtaatgtcaaagataataagggtactgcaagtgtgattggtggtgcaattgccggacttgtattgagtatcattttagcaattacattcgtagaaacactaggaaatagcggtatgcttcgtgagagtatggaagcgggattaggtatcgttgcggtcatattaatgtttatcgttggtgtttggatgcataaacgttcgaatgcgaaacgctggaatgctatgattaaaaatatgtatgccaatgcgattagtaatggtaatttggtattgttagcgacgattggtttaatatctgtgttgcgtgaaggtgttgaggttatcattttctatatggggatgataggcgaattagcgaccaaagattttgtcataggtatcgccttagccatcgtgatattaattatctttgcgttattatttagatttatcgtcagattgatacctatattctatatatttagggtattgtcgaactttatttttattatgggattcaaaatgcttggcgtaagtattcaaaagttacaattattaggtgcgatgccaagacatgttatcgaaggattcccaacgattaactggttaggattctatccaagttatgaaccattgatagcacaagctgcctatattatagtagttgctatcttaatctttaaatttaaaaataaaaacaggccgagtgcctgtttttttgttgttgcattgcggattatcgtagcattgcagatatcgtggtattgttgagatgcggatatcacttcattgttggttctcgttgtattgcagatatcacggtttaatccgatgctgtattctaattatcgcagtgttagttaggtgcagtattgatataatctgaggtgctacattgttcttttattggctattgtgatgttgctgcattgtgagtattgcagtattgattcgtataaggtcattgcgacgataagtcatttcgactggtgaacttaacaatgaacatactgaactcaaagagcaatatgagtggcaatgtgagtaatatatttaatgttatgtctggtggtgcaatgatactcgccagcacaaagcaagcaaaataaatatatttacgataatgtttcaaagaatatgtatctataagatcgaattttgcaagacctatgaataatattggtaattgaaatagaatgccaaatgtgaataaccaacgtatgagttcaatcaaatatgctttaaagccaatgacaggcgaaatgtttaaagttaatgataattttaacgcgaattgaatgatcattggaaagccaacataaaatgcaaaagcgacgccagcacagaataataacacgctaaaaaactatatttataaataaattgacgttcattattatgtaatccaggtgcaatgaatgcccacaattgataaaacatgactggtgaaatgaaacaaaacgcgatgaaaaatataatcatcacgtatatttggatcatttctgtgaatgaaaatgcatgtaaggacacatgtgcacgggtaatatacgttatgaatggtgtcatccaccaaaatgatgaaatatatacgacgatgaccgtaatgacgaacgacaataaaatttttactaaccgatggcgtagttcgctaaagtgaaccattaatgtatcatcagtactattgctctcgctgttgcttcgattccttactgggtgtatcgtgagactctttatctaaatcttctgttgcagatttaaattcttttaaagtagaaccgatagcacgaccaaattgtggtaattttttcggaccaaaaataattaaagcgataatgctaatgacgacaagacttgttggacctgtgatgcctaaaataaaagtgttagttatcatgataatcaacctcactcataagtagtatatagtatttactttataccgaacgataatgattatcaacaatattttatataataattaaaatattgttataaacacaacttactgaggtattaattctgaaataatagcttgttctttcaagtcgatataagtacaagtaccagcttgaatatcgatatgccatttataaatgccagcttcagccatttcatcacaaaatgtttcgaaatctgtttgtccttgttggtgtctagttaatacatcttgaacgatagattgatttgaacttggagcgacaggatgattactttttacagatgaagtaacaatatcatcttctgattgatgtacgtatgttgcagtgccatcttgaatattaacaatattgtacgtcatacccatatccttaaatgctttgaatagttttggaaaatcgacaccagtaaattgttgatgtgcttgttggatttcagataatgtaaatgccataatagtctcctttgaatggtttgatttagtgaaaatgcgtgcatcatactaaaattagaatgctgttaattatgcaggaaggtgtaacgaaagtaaacaattatgacttgtaggtgttgaggtgtgtgtttcaaaatgtcatacataggtggacacttatatttttttgtgctaatttgacaaatatagttgtcaaaaagacaaatatcatttacagtgtagttgaggagttgatgcgatgtgcgtaatcgattgaaagaattacgagcacgagatggcttaaatcaaacgcagcttgccaaactagcgggtgtttcaagacaaaccatttcgctaattgagcgaaacaactttatgccatcggtattaactgcaataaagattgctcgtatcttcaatgaaaaggtggaaactatttttattattgaggaggatgaggcatgaaaatactaagatatatcggatatcttttactgggtggacttgtagggggtatcataggtggaattttaggtaactttgatggattgggtattgagaacttgacgtttgcgacatataacaatgtcgttgtaatatcgattgttgcgactattattatcatattggtagaagccattgttttgatgaatcaaagacgtgcattgaagtataagcgacttgtagatgaagaggtagatatcgatgcaacagatcaatatgaattgcttgcgaatcgttatgttttaaatggaagtatattaagcattatacagacaattattgccttgttagtgttgcttatttttgtggtaggacaagctgaagcaaatggaatactattctttttaatacctttttttgttagtggtattttcaatacacaatttacgctgtttaatagaagatttgatgacagaatgccaaaaattgcagataagaattacactgaaaagcgattggaaatattggatgaaggtgaacgccatatagaattaatagcattatttaaaacatatgcgatcaacttatccatattgatactagccattatttttatagggtcttattcaattgctacaggaattaatcaaagctttagtttgctacttatcattgctattttcatatataacgcctttagttatttattgaagagaagacgtttttattaaaattaaacaaagaggagcatggatatgacaacattgttaaacgtagatcgtgtgaacaaacaatacaaagattcggattttaaattacaagatgcatctttaacgattgctactaatgagacagtaggattaatcgggaaaaatggctcgggtaaatcgacattaattaatattctagtaggcaatcgacataaagataacggtagtattttgttttttggagaagaacatgctatggatgatgtcgaatataaagaacatataggtgtagtgtttgatgatttgagagtacctaataaattgacaattaaagatattgataaagtatttcaatctatttatacgagttggaatagtcaaaaattctttgatttaatcaaatatttcgagttaccactacaaactaagattaaaactttttcaagagggatgcgaatgaagatagctttaacgattgcgctttctcatgatgtgaagctattgatcttagatgaagcaactgcaggtatggatgtttctggacgagaagaagtaatggaactattagaagattttgtcgcgcaaggtggaggcatcttaatatcatcgcatatttctgaagatatagaacaattagcggataaattagtgtttatgaaagatggacgaatgattttaactgaacagaaagatatacttttagcacaatatggaattgttacgacagaagagaaagatgttgaaattcctaagcatttaatcattgcatctagattatcgaaggggaaatatcaaattttagttaaagattatgaagaaattgaaaatgcagaacctttaaaacacattgatgacgctacgaaaatcataatgcgaggtgaagtataatgaaaggtatgttcctaagtagtttttatgcaacgagaaagcaaacatatatttattttatagtcgctatcatagctgcgggatactttgcagtatttaatccgttgatgagttcggcaatggctggggttatgttaatcacacctattactgataatattaaacatgaaaaagactcaagatggatgtattatgtatctactttaccggttaaacgtagtgattatattaagtcatactttgccttttatttaatcttattcggtgcaagtttaatgattggattagttgtgactacgattgtgacccaaagtgtgatgattggtattatgtcaggtttaatgagttttggtatcataggggcatactctatcattttcccattgacatttaaatttggcgctgaaaactctaatgtcattatgatatttgcatctatactactacttttttctttcgtggtctttttctttatatatggtatggttagtggtgcatctgcattagaatttgaaaaaattagcactggaggatggctagttgtcatagtatatgcggttatcggtatagttataacaagtgtttcttatatattgtctattaaaatttttaacaaacaagaactataatcaatattcttggtgtgaagctagtcattgaaataatatttagagcaggtgataaatcaatacgattatcatctgctctttttggtgtggaatgaaatgcagggtgataagtataggtgacatatctagattgatttatttgttttgaggtggttatgttgtgtgggaattatttccttttagatagtggggattagaggatatatgttatttataagtatcatttgatgattgtataggctaacgatttcctcggaaatatttaaaaacctcgatcatgtagcataactgaagtttgtcacaaagtataatgtgaagttcgacacttttggattcagttcaaatactttgaccgaggtaaatactatttatttatgtttattacgtagacgttgatttttaaaataaatcagcatgatgcagaaggttgcaactgatactgagataatcattacatggtcgtgtcccttaaataaaaggctgacaatataagacataacaagtatccctagtgaatatgaaatatacttcgcatttgtcaattcgttatggaaataaggcgtgattaaccataatccaatatagaatattaaaacactgatatacatcatattaatttcaaacaagtcatttaatttattgttattactaaaaacaattgcggcattaatcacacctaaagcgatattgattaatagatgcgtatacgataaacggaaaccgatagatgacaatttatgattaatgtaattttcagtaatgatccaatatacaccgaaaagactaattaaaatcataaattggaatatataaatgtaactaaaatgatcaatgctaaatgatgacgaagctaaaccaaccagtacctcgccaaagataataattgttagtaacgaaaaacgttctactaaatgcatcatattaacaggtgataatacaagatatttctgaaatggaataagtcctgtcgctgcaatgaatacgcctaaaaatccagggatgtaatggatactttgtggtagtactaatgacagaaatgataaaaatgaaatcacaaaggctacggtagcaaaggcttggcatgtacgcttatctccataatctaaaccggtacctatatgtaacaagtattgtaaaccgatacttagatacataattgcaacgcataagaagaatgggaagaatgtcttttcaaagtccggatataggctgttagataggaagaccatgataaacatattaaacatcataaacgagacgtctttgaatgtaacttgaccaaatcgatttgtaaaaaatgtttgatgagaccacattaaccataagaacaaactcatgacgatgtatttgaaaaataaatcagctgaaatggaaccattttgtattgttaaaatcacatgtgcaattttttgaatggcatagacgaaaattaaatcaaagaacaactcatggaatcctgcacgtttttcagctaaatgttttggtgttaatgcattaaccataaaattttaactcctttaagatgtgtaattaatttactaagtatactatttattttttctagtgaataggggcaaatttggcgatgaagtggaaggagaggtgactgcaaggtaattgcggaattaacaatcatcagcgatttaatatttgactagagacgtaatggtaagaaaaagttgatgagaaattgatggtgaaaccagatgtgaatagcgctgcaatgatagatagcatttaattagagtcataacgcgaaatgattaatgataatttgtggtaaatgaaagcataattttgtactatagatgaggatgatagagcatatttaagagtgtgaaatgttaaagtgaaaccgtttacgtttccgattgcccaaacaaattacatcattgtataatatgatttgttaaatgcataacaagaatgaaaatgtaacatacgtagcaattggtttcataaattggatgttagtggcgtattggttcattagacgtattagtaataaaattgtatatatcataaggagatgaatatgacatgacgagagtcgtattagcagcagcatacaggacacctattggcgtttttggaggtgcgtttaaagacgtgccagcctatgatttaggtgcgactttaatagaacatattattaaagagacgggtttgaatccaagtgagattaatgaagtcatcatcggtaacgtactacaagcaggacaaggacaaaatccagcacgaattgctgctatgaaaggtggcttgccagaaacagtacctgcatttacagtgaataaagtatgtggttctgggttaaagtcgattcaattagcatatcaatctattgtgactggtgaaaatgacatcgtgctagctggcggtatggagaatatgtctcaatcaccaatgcttgtcaacaacagtcgctttggttttaaaatgggacatcagtcaatggttgatagcatggtatatgatggtttaacagatgtatttaatcaatatcatatgggtattactgctgaaaatttagtagagcaatatggtatttcaagagaagaacaagatacatttgctgtaaactcacaacaaaaagcagtacgtgcacagcaaaatggtgaatttgatagtgaaatagttccagtatcgattcctcaacgtaaaggtgaaccaatcgttgtcactaaggatgaaggtgtacgtgaaaatgtatcagttgaaaaattaagtcgcttaagaccagctttcaaaaaagacggtacagttacagcaggtaatgcatcaggaatcaatgatggtgctgcgatgatgttagtcatgtcagaagacaaagctaaagaattaaatatcgaaccattggcagtgcttgatggctttggaagtcatggtgtagatcctgctattatgggtattgccccagttggcgctgttgaaaaggctttgaaacgtagtaaaaaagaattaagtgatattgatgtatttgaattaaatgaagcatttgcagcacaatcattagctgtagatcgcgaattaaaattaccttctgaaaaggtgaatgttaaaggtggcgctattgcattaggacaccctattggtgcatctggtgctagagttttagtgacattattgcatcaactgaatgatgaagttgaaactggtttaacatcattgtgtattggtggcggtcaagctatcgctgcagttgtatcaaaatataaataataagaaaacaggttatcacaacagtattaattacatgttggcataacctgtttttatttgtttatggatttattgggtaatattagtcatttgatggtttaattgcaaatgctctaacagggaacccaggtgcatcttttggtttagggctgatagcgtaaatgatggcgccacgagttggtaattgatctaaattagttaataactcgacttggtatttatcctgaccaagaatataacgttcgccaactaaatcaccattttttacaacgtccacagatgcatcggtatcgaatgtttcatgaccaacagcttcaacacggcgttcttcaattaagtacttcaaagcatctaatccccaacccggtgcatgttgttgtccgttcgcatctttgttttcaaacgtttcaatattaggccaacgttttgaccaatcggtacgaagtgcaacaaaagtgccaggttcaatagtaccatgctctttttcccatgcttctatatgcgcacgtgttacgatgaaatcattgttgttcgctacttctgttgaaaagtctaatacaattaacggcaataccaattcttttaaatcaatgtcttctaaataacgtttgttctcgacaaagtggattggtgcatcaatgtgagtaccatattgcgttacaatattccaacgttgcacatagaaaccatgatctttaaccgtgaataaagttgaaacttcacctttttcaaactcactaaaacgtggtatttctggatcaaatgtatgcgttaaatcaacccaagttgcttgttttaaagtatttaattgttgccataaaggatagtgtgtcataaaatcacccgtttttagtttattatatgataaatgctgcgattattcttggcgtttagctttaacagcattcacaagtacagtcaatgcatctttaacttcttcttcttttcgcgttttcaatccacagtcagggtttacccagaataatgagcggtcgatttgttgtagtgaacgattgattgctgtagtaatttcttcttttgttggaatacgtggactatgaatatcatatacacctagaccaatacctaaatcataattaatatcttcaaagtctttaattaaatcaccatggctacgagatgtttcaattgaaataacatcagcatctaagtcatgaatagcatgaataatttgaccgaattgagaataacacatatgtgtatggatttgagtttcatcacgaactgaagacgttgcaagtttaaatgataaaacagcatctttaagatattgttcgtgatattcagagcgtaatggtaagccttcacgtaatgcaggttcgtcaacttggataactttgattcctgcagcttcaagtgctaatacttcttcgttgattgctaaagcaatttgatcttgaacaactttacgtggtaaatcaacacgttcaaatgaccaatttagaattgttacaggcccagttaacatacctttaactggtttatctgttaagctttgtgcataaactgtttcatcaacagttaaaggcgctgtccattttacatcaccataaatgattggtggttttacggcacgtgaaccatatgattgcacccaaccgaatttagttactaagaaaccttgtaatttttctccgaagaattcaaccatgtcattacgttcaaattcaccgtgaactaatacatctaagccgatgtcttcttgaattttaatccatcgagcaatttcattttttaagaatgtttcatatgcttcgtctgtaatgcgtttgtttttccaatctgcacggtattttcgaacttctcggctttgtgggaatgatccaatagttgttgttggtaaatccggtaagttcaaacgtttttgttgttgttcaatacgttgcgcgaatggtgattgtcttgaagtacgcacgctttcgaaatcataatctaagtttttgaatgattgattttggaaacgctcataacgtgcttttaatttatcatatttaacactatcgttttgattaaataggcgacgcaatgcatctaattcgtctaatttttcagttgcaaagcttaagccttcgccaacacttgaatctaatgtttcatcatctaaagatactggaacatgtaataatgaagatgatggttgaatgacaagctcattagtgtgtgctaacaatttatcgattaaggcttttttagcttcaatgtcacttgcccatacattacgaccatcaataattccagcgtataatgtttttgatttatcaaaatctcctgcttcaatttgtttaaggttatagccattatcatggacaaagtctaaacctaaaccaccaacaggtaaagaacttaagaatttaagatgtgcacgttcgaagtatgtttgaatcactaattttttagcaacaccagctttttcgaaatagtcataagcttcacgtgtaatattttcatagctttcgctgtcgtctgtaactaagattggctcatcaacttgaatgtactcagcacctgcatcaattaatgattcaaacacttctttataaagtggtaataacgttttaactttttcttcaaaagtttggtgaccgccttttgataatttaacaaaagtaatcggaccaacgatgacagggtgagcgttaacgtttaaagattgggcatatttaaagcgatctaataatacgttgcgactcactttaggctcaacattgtcccattcaggtacgatgtaatgatagttagtgttaaaccattttataagtgcacttgcaacatggtctttattaccgcgagcaatatcaaataataagtcatcatcgatagttctaccttggaaacgttcagggatgatgttgaataataatgacgtatctaaaatatggtcatataaagagaaatcaccaactgggatgctatctaagtgatagtacttttgtaataataaattttctttatgtagatcagttaatgtttgatctaattcttctttagaaattttctttgcccaataactttcgatggcttttttccattctctttttctacctaatcttgggaatcctaagtttgatgttttaattgttgtcataatattgcctccttgtgagcagtaatagattttgagtatgctgcaagttctaatgaatcttcgacattttgaaacggtgtgataatgtataaaccattaaaatattcatgaacagtatcgattaaatcctttgaaagcttaagacttagttctcgtgttttggctttatcatctttaactgcttcaaattgttgtaaaatttcatctgacatcttgattcctggcacttcattatgcaaaaagagtgcgtttttgtaacttgcgataggcataatgcctatgaaaaatggtttgttcaagtgcttagtggcatggtaaatttcaatgattttctctttgctgtacacgggttgtgttataaaataagacattccgctttctatctttttctctaatcgttttacggcaccatctaatttacgaacattagggttaaaggcgccagcgatgttgaagtgtgtacgtttcttcagcacatcaccgtcagtgttaataccttgattaaatcttagagcgagttcagttaatcctttagaattaacatcatagacattggttgcacctggtaagtgaccaacttttgaaggatcaccagttatggctaatatttcgttaacgccaatgagcgataatccaagtaaatgggactgcaagccgattaagtttcggtctcgacatgtaatatgtacgagtggttcaatgttataatattgtttaattaagcttgcagcagcaatgttgctaattctgacagttgccaatgaattatctgcgagtgttaccgcatctacattagctttgtcaagtttagcgatattttcaaaaaatctattcgtgtctaaatgtttcggtgtatccaattcgataataacggttggacgttcttgaaccttagatgttaatgattgtctaactttattttgagatggattgaaaagtgctttcgttggtatcggaatcacttttttgtcattaacaggtttaagtgtctgaatagattctttaataaatttgatgtgctcaggggttgtaccacagcaaccaccaattaaacgaacaccttcgcgaattagattttgagcaacttgaccgaaatattgtgcattgtcactatacttaaattcactattttcaatatctaataagctggcatttggataacaagataagtatgcgtgctctggtaattcaatatgtgtgaaagactcttgcatatggtgcgggccatgatgacaattgagtcccacgatatttgcaccacattgaacgagttgttttaatccttcattgattgcctgaccattaactaagtaatttgtgtttgaagcggttaattgagcaatgattggaatgtcgtatttctttctcgttcgtgaaatgacatttgttagctcttctaggtcgtaatacgtttcgaaaagtagcgcgtcaacaccttcttcaattaaggtgtctatttgaatttcagtatgataaagaatagtttgtaagctgatatcctcttgtttgatacctctaaacccaccaactgtgcctaatatatacgtatctttatttgctgctttttttgcgatgcgaacggcggcttgatgtattgctttaactttatcttcgagaccgaatcgttttaacttttcaaaatttgcaccataagtattggtttgaatgacatcagcaccagcttcgatatatgaacgatggatacgctcaactttatctggatggctaagattatatgcttctggacaggtgtctaaaccttcagagtataaaatggttccaatagcaccatcagctactaaaacattatctttcaattgtgtgaggaattgactcattgaatgcctcctttaatgcgtatttgatgtctgcaatgagttcatcaggatcttcgagaccaacacttaatcggaatagaccgaaagtgataccacgttcttgtctcacttcttcaggtagtgttgcgtgagacattgttgctgggtgcgaaagtattgtttccacaccacctagactcactgaaacgagtggtaatgttagtgcatcgacaaattgttgtgctttagactcatcagctaaacgtaagccaataacggcaccgccatttttagcttgttctaaatgagctgcagtgagtcccggataataaacttctgaaatttcatcttgctttattaaaaatgacacgattttttgcgcgttttcgacagattgtttaaatctgattggaaatgtttttaaatgtttagcaagcgtccagctatcttgagcagataacatattgcctgtaccattttgtattaaataaagagcttcactaattgcctcattattagtaatgacagcaccagcaattaaatcgctatgtccacttaaaaattttgtagcactatgaatgacaatatcagcgccaagtaataaaggtgattgacctaacggtgtcataaatgtattgtccacagctaccagtagcttatgcttttcggctattttagaaacagctttgatatcagtaattttaaaacagggattcgatggtgtttcgatataaattaattttgtgtttgattgaatggcaccttcgatttgttcgagctttgtagtatctacggttgtaaattcaatattaaaacgattcaaaatttgttcagtgaggcgaaaggtaccgccatatacatcatcaggtaagatgacatgatcaccagatttgaaagtcaaaagtactgctgaaatagcagcaatacctgatgcaaaagcaaaagcgaattttccctgttctaatcgtgctaacttctcttctaaaagttcacggttagggttgccacttcgtgcataatcatatttaacatcgccaccaagacttgtttgatggaatgttgaagaatcatagagtggtgggttagctgaatgatattccacacctctacgccaatcgaatatcacttctgtctcttttgaaagtgtcatacaatctctccaatctgagctttatctaatgcttggatgatatcgcgttcgatgtcttcataattttcaacgcctagtgataagcggattaaatactcatcaatgccacgtttatctttttcagcatctggcatatcaacatgtgtttgtgtgtaagggaaggtcactaatgtttcagtgcctcctaaactttctgcaaaaatacaaatatctaaattttctaataatttagcgacgctataggccttgttaagtcttaaactaagcatgccagtttgcccgctatatagtacttcgtcaattgcttgaagtgactgacatttttcagcaagttttcttgcgtttgattgcgcacgctcaatgcgtaaatgcaaagttttaagtccacgtaacaacaaataactatctattggtgatagtgttgcgccagtcatgttgtgaaaatcaaacaactgttgcgcgagtgattcatctttgacggttacgacacctgctagtacatcgttatgtccaccaatatatttcgtagctgaatgtaagactatatcagcaccttctgctaatggtgttgaaagataaggtgttaaaaaagtattgtcgataattgacaataagcctttagctttacaaagttgatagtacggctttacatcaatagcaatcatttgtgggttagatataggttcaatgaataatgcaactgttttatcagtgatttctttttcaacttgttcataatctgtaaaatcaacgtacttaaatttgatatcgtattgttgctcgtaaaattcaaataatctaaatgtgccgccgtataaatcgaatgaaactaaaatttcatcgtgtggtttaaataaattacatattaattgaatggctgacattccacttgatgtagcgaatgatgcaataccatgttcgagtttggcaaaacaggtttcaaatgttgagcgtgtaggatttttagtacgtgtgtaatcaaatcctgtcgattgtcctagttttggatgcttgtaggcagtagataaatggattggattcgctatagcaccggttgaatcatcagttaatgtgaattgggctaactgtgtatccttcatattaagaccctcctagtaagaaaaaataaaaaagcttccgtccttcgtacccgaatgaatcggataaaaaggacgaaagcttatgtttcgcggtaccacctttatttgttattccatcgctgaaataaccttattcagtacgcattaaaagtaaatatgcttactgaacaattatcacaatttaagtcgttaagtaaggatatagtaatgtgctatcccatacttattaacaaaaaatcgtgcgtaaagaatccagtacgccatttaacatcaatgttaatactgtatcgctataacgggcgaacccgtagacacctcatattggcatcaacactccaaggccattttcaaacacgctttcaaaatcttctctcagctactaaagactctctgtataagcagggtgtgttttactttcctctttattgtgtttacgtttcattaaactgttataagatattaattagcttacagagtaaaaaaagatttgtcaacaattattcagaaaattttgatttaaaagttaatttgtttgtgaaattgtaattggtatcttgaagttgaaaaatgaattattttttaaataaagtgtggttaatggttgtctgactcatttagaatacataaaatatatttaactgttgttatcaaataaaaagtgatgtgagtgaattgtcaaaaagtgaagatcaacgtattactaaaacaaaagatgaacaaattaagaaaatagatatatcggatatcaaaccgaatccgtatcagccccgaaaaactttcgatgaaaatcatttaaatgatttggcagattcaattaagcaatatggtattttgcaaccaattgtgctaagaaaaacagttcaaggttattacattgtagttggtgaaagaaggtttagagcttcgaaaattgctggtctaaaatacgtatcagcgattatcaaagatttaacagatgaagatatgatggaactggcggtcatcgaaaatttacaacgagaagacttaaatgcgattgaagaagctgaaagttatcaacgtttgatgacagatttgaaaattacacaacaagaagtagcgaagcgattgagtaagtcgcgcccgtatatagcgaatatgttgaggttattacatttaccgaaaaagattgctgacatggtaaaagatgggcgactgacaagtgcacatggacgaacgttattggcaattaaagatgaacaacaaatgcttaggttagcgaaacgggttgttaaagaaaagtggagtgttagatatttagaaaaccatgttaatgaattaaaaaatgtttcgtcaaagtcggaaacagacaaggtagatataactaagcctaaatttataaagcaacaagaacgacagttgcgagaacagtatggcgcaaaagtagatatatcgataaaaaaatcagtcggcaaaatctcatttgagtttgaatcacaagatgactttgtgagaatcattgaacaattaaatcgtaagtatggtaaatagttacacaattttatataatatcactttgtgaatctatagatatatcgatagttatctatattctttgaagatgatgcgatttcagtaggttggaagaatacaacaatattaataaaattatttgagactatatagaagggagtaacgctaattatggatcaagttatgagtattatttcatcgctattcgaaccattaactaaaattgaaacatatgaaaatattgcaactaaaatcgctatgattgttatttatattatcgtagccctcatagttattaaaatactgaataaaatgattgaacagggatttaagattcaaaataaaagtaaaaagagtaacaaaaagcgctctaaaactttaatatctcttgttcaaaatgtagtgaagtatatcgtttggtttatagttattacgacgattttaagtaaatttggcattagtgttgaaggtgttattgcaagtgctggtgtcgtaggtttagcagtaggttttggtgcgcagaccattgttaaagacgttattactggatttttcattatatttgaaagccaatttgatgtaggtgattatgttaaaataaacaacggtggtacaactgtagcagagggaacagttaaatcaattggactccgttcaacacgtattaatacaatatctggagaacttacaatcttgccaaatagtagcatgggtgaaataacgaattactcaattacgaatggaacagcaattgttaaaattccagtatctgtagatgaaaatattgataatgttgagaagaaattaaacaaattatttacatctctgcgtagtaaatattatttatttgtaagtgatcctgttgtgattggtattgatgcctttgaagatactagagtaatattaagggtttcagcagaaacaataccaggtgaaggtttctctggtgcgcgtattattcgtaaagaagtacaaaaaatgtttttacaagaaggtatcaagacaccacaaccaataatgacaccttttaatcatagtgaaaacggtgtttagtagtttataatacatggaggtcatatttaatggcgtcaaaatatggaataaatgatatagtagaaatgaaaaaacaacatgcgtgtggaaccaatcgttttaaaattattagaatgggtgctgacattagaattaagtgtgaaaattgtcaacgaagcattatgattccacgtcaaacgtttgataaaaaactaaaaaaaatcatcgtatctcaggatgatacacaaagataggagaatgattcatggctttaacagcaggtatcgttggcttaccaaacgttggtaaatcaacattatttaatgcaattacaaaggcgggtgccttggcagcaaactatccgttcgcaactatagacccaaacgtgggtattgtagaagtgccagatgcaagactacttaaattagaagaaatggttcaacctaaaaaaacattacctactacatttgaatttacagatattgccggaattgttaaaggtgcttctaaaggtgaaggtttaggtaataaattcttatcacatattagagaagtagatgcaatttgtcaggttgttcgtgcttttgacgatgataatgtaacacatgtagctggtcgagttgatccaattgatgacatcgaagttatcaatatggaattagtacttgcagacttagaatcagttgaaaaacgcttacctagaattgaaaaattggcacgtcaaaaagataagactgctgaaatggaagtgcgtattttaacaactattaaagaagctttagaaaatggtaaacccgctcgtagtattgactttaatgaagaagatcaaaaatgggtgaatcaagcgcaattactgacttctaaaaaaatgctttatatcgctaatgttggtgaagatgaaattggtgatgatgataatgataaagtaaaagcgattcgtgaatatgcagcgcaagaagactctgaagtgattgttattagtgcaaaaattgaagaagaaattgctacattagatgatgaagataaagaaatgttcttagaagatttaggtatcgaagaaccaggattagatcgattaattagaacaacttatgaattattaggattatcaacatattttactgcaggtgtgcaagaagtacgtgcttggacatttaaacaaggtatgactgcacctcaatgtgctggtatcattcatactgattttgaacgtggatttatccgtgctgaagtaacaagttatgacgactatgtacaatatggtggcgaaagtggcgctaaagaagcgggcagacaacgattagaaggtaaagaatatattatgcaagatggcgatatcgttcatttcagatttaatgtataaacgatagagtgaaggtaattaaatagtatatatgtagaagaggcggaatcaattgttcgcctcttttaattatgcgtataatttattaaaagaatggaataattttactcgcgttaataatatcttgagtgctaaaaaattgtttgccttcgccattataagcaggctctaaaacaagattagcctttgcacaataaagccattcaggatgaatgccactattaagtatctcttggaattcttgaaaatctttagaccaatcaatatttaaattcattccttaccacctcacaaccattatagaacatgcgttcgcttttgtgaagtgtatttttaaaaatatcatagaaaatttcaaatgaattaatgtcaaaaatgatatgaagagtagtttgaattattattgtaaaaagtaatggcgcatgatataattctttattgtgagtaatgaaaattattccttgcttatctgttttaagattgataagccgtatagaccacaaggaggtgcaaatataaaatgagaacatatgaagttatgtacatcgtacgcccaaacattgaggaagatgctaaaaaagcgttagttgaacgtttcaacggtatcttagctactgaaggtgcagaagttttagaagcaaaagactggggtaaacgtcgcctagcatatgaaatcaatgatttcaaagatggcttctacaacatcgtacgtgttaaatctgataacaacaaagctactgacgaattccaacgtctagctaaaatcagtgacgatatcattcgttacatggttattcgtgaagacgaagacaagtaataattagagggggcgtttaaatgctaaatagagttgtattagtaggtcgtttaacgaaagatccggaatacagaaccactccctcaggtgtgagtgtagcgacattcactcttgcagtaaatcgtacgttcacgaatgctcaaggggagcgcgaagcagattttattaactgtgttgtttttagaagacaagcagataatgtaaataactatttatctaaaggtagtttagctggtgtagatggtcgcttacaatcccgtaattatgaaaatcaagaaggtcgtcgtgtgtttgttactgaagttgtgtgtgatagcgttcaattccttgaacctaaaaatgcacaacaaaatggtggccaacgtcaacaaaatgaattccaagattacggtcaaggattcggtggtcaacaatcaggacaaaacaattcgtacaataattcatcaaacacgaaacaatctgataatccatttgcaaatgcaaacggaccgattgatataagtgatgatgacttaccattctaataaaaattaacgaaattaaagcgaaaaaattatcaaaggaggcacacaatcatggcaggtggaccaagaagaggcggacgtcgtcgtaaaaaagtatgctatttcacagcaaatggtattacacatatcgactacaaagacactgaattattaaaacgttttatctcagaacgcggtaaaattttaccacgtcgtgtaactggtacttcagctaaatatcaacgtatgttgactacagctatcaaacgttctcgtcatatggcattattaccatatgttaaagaagaacaataatatataatttattgtcaaaccccgtaggcataggcttatggggtgtttttgtgttttgggataaaagatgaagggcaaaaaagaggatgtgaatgttttgtgttcggaatttgcacaaagatatgtttatattgcaaaaataatatgaatttagatgcataaaaaaagaggcaaccgtcagtaacagttaacctcaagtgcattccgcagatatgcaccgctatttatgtataatattaatctgtttttagataaaaatcaaggttattgataaagttctttaaacttcttaatttaggtcttgctcgaacgcctataattttatcataagtcgactcgcttatctttgatcgtaaaaaatcaaggttttgttcgaattgccttataattctttggagttctgctttagaataagagagaccagaacaaattagaattaataaaatgagataatcaattaactttaccgtcgatatctagcgttttatcttcatagtttatattttctctttttattgcaagtagctcaccgatacgcatgccattagcaatttggaactgcactatagattttacctttttataattacgttttctcgttggatatttttatgctgaattagatagtcgaaacaatccggtatttctttcactacattatcttttaaattgttattacatatagttagtaacgcatcactatagggatatctattttatctattacacatataactttgaattgcttactattttaaattaacaatatatattctcatagaatttgtccaattaagtgtagacgattcaacatttagaaggaacatacagagttgctgatagagtgtatacacctaagaggaacattactcttaataaagaagttgtcactttaaaagaattggatcatatcataagatttgctcatatttcttatggcttatatatgggagaacatttgcctaaaggtaacatcgtcataaatacaaagaatggtggtaaatatacattagagtcgcataaagagctacaaaaagatagggaaaatgtaaaaattaatacagccgatataaaaaatgtaactttcaaacttgtgaaaagtgttaatgacattgaacaagtttgaaattaagttaaattagtatatagtgttttatcgctaatactttgaaagttaggtatccgaaggtgcctaactttctttgttatgaccatcatcatatagaaaattctttaatgatgttaatgccgaaatttgcaaaaataatttctcttttatggttaatcaatatgtttttacattcgacaaccttaaaattaacttctttcaattccataataaagtctctataaaataacttagtttaaaaacgattcgtatctttcagattcaaataccatcattttctctttagacttacattttaattacaattatgtaagttgttttcagagacatcctattttatattttgtcagaggtgattttttgaaaacgattttaaaaacaataacatatcttgcacttactatcattggcgcttatgctgctttattcattttaaaaacaatagactctcatggtataacagatcaatttaacccattagtaaaggaagatgattcttatgttaaaacgacagaggtgtctactagaatggatgatcaactccgaagttatagtcaaagtgcttttaataaagaagggaaagagacgcaattaatatatactgctacatttgatgttaaaccgcatagatacttaaaaattacacataagggtcatcatgtagaaacttttgaagaagttgaaaaggaagaagtaccaaagaaagcattagacaaactgagtcgataatagcatccttatattacatggttcattttaaagatgagtacgaaatgaagtaacgcatgacgattaatttaaaaatatttgtaataattatgaatagaattaaaaacaaggggtaatacaatctatatagcatataagcttttgttatgagtttcaaaaaaggaagagagagtgatattatgaaattaaaatcattagcagtgttatcaatgtcagcggtggtgcttactgcatgtggcaatgatactccaaaagatgaaacaaaatcaacagagtcaaatactaatcaagacgctaatacaacaaaagatgttattgcattaaaagatgttaaaacaagcccagaagatgctgtgaaaaaagctgaagaaacttacaaaggccaaaagttgaaaggaatttcatttgaaaattctaatggtgaatgggcttataaagtgacgcaacaaaaatctggtgaagagtcagaagtacttgttgctgataaaaataaaaaagtgattaacaaaaagactgaaaaagaagatacagtgaatgaaaatgataactttaaatatagcgatgctatagattacaaaaaagccattaaagaaggacaaaaagaatttgatggtgatattaaagaatggtcacttgaaaaagatgatggcaaacttgtttacaatatcgatttgaaaaaaggtaataaaaaacaagaagttactgttgatgctaaaaacggtaaagtattaaagagtgagcaagatcaataaaatatgccgtaacactaatgataataacatgtcttaattcatattaattattaaaataccctcacaacgcaatgtaatatatccagtatagatttgaaaggatatatgtctaacgtgttgtgagggtttaattgcatctatttatccatgcgaatatcgacttcttctaaatgtttctgatattctttaaccttactttctaaaaacatttcatatggtgcatcaaagaagtcagctaaatgcatggcatctttaaatttaggttcatggtgatgattctcccattcccaaatttgatgtgcttcatatttagtaccatatttctcatttaattgttgtgctaattcgtcaatttctaaattatgtttagttcgtaagttatataaaatatgcatattcattgttcattaacctcgcttcttgatttaaaattcaaagatgctctaataatatgtgtatattctagtcctataacataaaataatcaagctatgaattcggcagaaaaaataatgtatatgatattgctggtacagagactttaaataacgatagctacattgaataaaattgatattcaattactactttgaaaaatatttagataaaaataatttgaatttgttttagaaagtctaataatgggtactacttagaataacgcaaaataaatagaaaaaggagactgaaaattatgtttggatttattggaatgttaattgtcggtggcttaattggatgggctgctggtgctattatgggtaaagatatcccaggtggtattttaggtaatattatcgcaggtattattggatcatggttaggtggaacattattaggacattggggtcctgaactaggaagcatttacatcttaccagctttaattggttcaattatcttaattgcactggtaactttaattttaagagctatgcgtaaataataaaaaattcaacttaggttgaattgaaataaagatggcattcagttgtcatcttttttatttgcgtgaaaatggtcaatatatattataatatttgaaaatgtaggtaagatagaattgaaaagtaataaattaatatgaggaaattttggaaataaaaaagcgagtatttgacaaataaaaaaggatgacgttgggttgcgtcatccaggagtattatgttcatgaatataaaagactgtgtagtcatttaagaactacacccatatagtaacacatcacttgattaaagacaatactatttttagagtcattaatttaaaatatgaattaattatttttttagaatagaatattaagattgatatcgaattagtagtcaaagtgttatggtagatatgaaatacataaggtgaggagtaatattatgacgatttatttagttagacatggcgaatcaaaatcgaattatgataataaacattttcgatcttatttttgtggacaattagatgtgccgttaacggaaactggcacaaaaagtgcagacgatttatgtgattattttaaagagaaacagattaaacatgtatatgtttcagacttattaagaacacagcaaacgtttgagcatatttttccatatgacattgcatcaacgactacgcctctattaagagaacgttcacttggcgtatttgagggtgaatataaagatgaaatcagtgcgaatccgaaatatgaaaaatatttcaatgatccaaactttaaagactttcgtcatagtttttcacaaaaagcgcctgaaggagaaagttatgaagatgtatatcaacgcgtagaacattttatgaatcatgttgtcaatgaagatacacaaaaagatgatattgttattgttgcacatcaagttgtcattcgttgtttaatggtttattttaataacgtttcacgggaagaagctgtggatttaaaagttgaaaattgcaaaccatatatcattgaatagaagtatagaggttctgaaaagctgtgttttatagcggtcttcagaaccttttttgctaatgggaatcattcttatcaaaagccttaccaccaatagctaatgtgataattgcgcttatgaacaaaataattgaagttataaatgacgctaatgtaaatggtgtaaattgtgtgagcgataatatcaatgataaaaagaaccaagagatagcccctagaaattgtaaaatagcagaagaaattctaaaactcatataatcatatatagctaaaacaagtgaaggtaatgcgactaataccattataatgatgttgagggtgaataaatatggctgttcaaaagttactgtgtttggtcctgttggatgcattgctgctaagaacaagcaaacaatcgtcgataaaattgctaaaataataaaagtgattcgaactttcatcatgaccatcctttgtttatagagtcaatataagtatggaatatgttaggtatatagtcaaatgcgttaactaatgggtgattttggcatagatagagaatttaagaccaataaaaaagcatcaaacagtaataagctgcttgatgcaaaatggtatggtattggttaaaatgtattgtttcaaagattagtcacttttaaagataaagaattgtcatgaattaaagcacatgtaatgatgtgttacatgtcgcaatgatggctttcagttatttatcgataacatcactcttgatacctttagattttaagaaatctttaattttatcttgttgctttttattaacatcaccggcatattttgttggcacgtcgacaacattgattttattttgcggttgatagctaagcttttcaatatcttcatcaacattggcgattgtactatttaaagctttgaagtaattcatcattaattcaacgggtttcttatattctttaggaatattgttttcagtgacaaatttcttgaaatgcaaatcgtttttaacagctaagttagataagtggctaagtgtttctgcttgtttttcagtcacttttgtttgactgtcaatttgtttatctagtttatgttgcataatatatttgttatcaagtatatcgctatttacagacaaatacttttctatagcttgcttcatctctgcatcactaatatcactatttttcttatctgagttaaagatatcttttgtttctaattttttagcgcttttaggtgcatggatgccagtacttgtgtgatgatcttcgttatcagattgatcggacgcgcaacctgtaagaattaatgtcgatgctaaaaatgtacttagtagtaatctctttttcataatgtaatataactccttagtttatctttaattgaaaaaatatgtattcatgctaatagagtaacgttgaattagtttggaatgtcacgatgaccttgcaatgaccatagacgtaaatgattacgtgcatgagttgctttttctatcaataatgcgtcgttttgaacgttgttaaggatagcattatctataaataactgcataattggttgtactaatttagacgtaggtatcgtacgtaaaagcataatgatttcattcacatacttttccttctcaatatcatttttcatattgatttgtttgcgtagataactggtaaactctttaattgcttgatcagatttcaaatagtggtgtctatcataatagattaattcctcaacagaagctggtacatagtatccttcatcagaaatatcaatgcctgacgcctcagactcgacaacatcaaataacacagggtgaaacacgaagtcatcttcaatataatatagctcagtaccagctaaagtatctaagctatattgcaactcttctttactaaaagtagcgtcataaaatctttgtgtgagatatagtagatgattagttgataaaataccatacaagtttacagaaccaagtataatacgaagaggtaaaatatcttttttatctattaatcctttcttaatctcagaaatcaattgagtgattgcatcgcttcttaagctatcggttgtaccaaaatcttcaaagtcatcatcttcattatatagtatatcgaagtgagcttcgtcatccatcattgataattctatcgcattttcaaaatctgctaaactatgcttaatcgtttgctcatcaataaatttattgatagccttctttatatcgccgtcaccgatttgattcacgtaattttcaatatgtttacgcacgtcatttggtaaaatgagacaatcatactcgaagtcataataataatagaaatgagtaattaaaaatgtgccaggattcatcaaatgaatgttttcaaatgtaattagttcattgtttaatcgatagttatcatcactttcgagtatgccagtaagaatactaaactcaaataaggaagcattagaaaacacttgttcaatgatatgattattattgaaaaatgctgtcataatcaatttaacaagattttgcttgtttttatttgagaatcctttgataccatactgtctgcaaattgcttttagctcatcattagtttttaacagtaaagcctgttccattgtgacatcgtttaagcgcgtatgttgtcttacacgaaagatttcatcatttaaatgcatatggtcttttgtatctaatgtttcgaattcaccatatgcactatctagtacctctgaattgatataacttaaaaataaattatttacaaagaacgtatcttcgttaatttgaataacaaaacctagatgatttgttagctttaaaatattaacctcatggctatttatgattgtgacaggattaccattagatataagtgtttctaaaaatttttgttctgtcttatccatatcatgataaatcttatgtaaattttcaggacgtaaagcgtgaatcgtgacttcaaatccttctttttgggtcggtaaattaaaatattcgcatgcattttgtaatttttctgggtatataaaatgaacatcaagcatttttgcacacctcgttgtatatattaagtttatcataacatgattttatgtcgggataaaaaaataacagcatcttaacaaatgtaagatactgtcagtgaaatgaatgaaactttagtttctgataatatagtcaaaggcatttaatgctgcatttgcaccagcgcccattgaaataataatttgtttgttcttctgatctgtgacatcgccagcagcaaatattccaggtacgttagtattattgttacgatcaataacaatttcaccacgttcgtttaattcaacagcatcttttaaccatgatgtgtttggaagtaaaccaatttgaacaaagataccatctaagttaagtagatgttcttcgccggtgctcatgtcttcgtaacgtatacctgtaacatggtcttctccgacaacttcagtagttttggcatttgttttgatatcaacatttgataaagaacgtaaacgatcttgtaacacgttgtctgcttttaattcgctagcgaattcgaataatgtaacatgattaacgataccagcaaggtcaattgctgcttcaaccccagagttaccgccaccgataactgctacgtctttattttcaaatagaggtccgtcacagtgcgggcagaatgcaacacctttattaatcaattgctcttcacctggaatgtttagcttacgccaacctgcaccagtagcaataatgactgttttactttctaagatagcaccgttttctaacgtaactttaattgcttcgtcagtcttttcgatatctgtagcacgtatacctgtcattgcatcaatgtcatattgatcaatgtgcgctgctaagttagaagaaaattcagaaccagttgtttctttaacagtaatgaagttctcaataccagcagtatcattaacttggccaccgatacgatcagcaactataccagtacgtaaacctttacgtgctgtgtaaatcgctgcactaccactagcaggaccaccaccaacgattaagacatcataaggttctttattttcaaactcagatgcatctgccgtactgcctagtttcgaaagaatatcttggattgtcatacgaccattgccaaattcttcgccatttaaaaagacagcagggactgccatgatgttttcagattcttcacggaacactgcaccatcaatcatagaatgcgtgatgttagggttgatcacactcattaagttaagtgcttgaacgacatcaggacatttttgacacgttaaactaatgaatgtttcaaaatggaatgaaccttctaagtttttaatttggtcaatgattgactgtttttctttaggtgcacgaccactaacctgtaaaattgctaaaacaagtgagttaaactcgtgacctaatggaatacctgcaaatgttacacctgtttcttcgccaggacgattgactgagaaacttggtgtacgttttaaagacttttcagaaagtgaaagtctaggtgacatatcagaaatttctgttaataattctttaagttccttagatttatcatctgaaccaaggctggcaacgaattcaacgttgccctccattagttctaataattgtttaagttgttgttttaaatcagcattaagcatggttgtaatgcctccttagattttacctactaaatctaaaccaggttgcaatgttttagcgccttcttcccatttggctgggcatacttcgccagggtttttacgaacatattgagctgctttgattttgtgagctaatgtactagcgtcacggccaattccgtcagcgttaatttcagatgcttgtacaacaccgtctgggtcgataatgaatgtaccacgttgagctaaaccagtagcttcatctaatacatcaaaattacgagtgattgtttgtgatgggtcaccaatcatagtgtaagtgattttgctaattgcatctgaatggtcatgccatgctttgtgtacgaagtgagtatcagttgatactgagaatacatttacgcctaatttttgtaattcttcatattggttttgtaagtcttctaattcagttggacaaacgaatgagaagtcagcaggatagaagcatactacgctccaagaaccttttaaatcttcttgtgtaacttctttaaattgatctttttttggatcgaaagcttgcgctgtaaatggtaagatttctttgttaattaatgacataaatatcttcctcctaagaatttaagtatgaattagaactatcaattgattatgcttaattataataattctaatctcttagttagcattattacattttgatccagaatagtcaactggataactttgtaaagtgaatgattacttttaaaataaaaaaagataatataaagtgctttgataatggattttgtagttgatgatttaaaaggttgtgtctatatttaatatcttgattttaatgtaaaaaaatgtaaaaaaagaagatttgtattctcaactaagtcaaccttattgataatggtgtgagaatatttgttcgagatggatgaaggtaatgcgtgagaaactggatttttaagtacgagacaatatttttgaaagttcaattattaacatataagcaaataattgctataaaaaagtttggacgtgtacaattgcaatatgaagatttttaattaactgtaaagtatcgaggagtgggtaacgtgtcagatcatatatataatcttgtgaaaaagcatcattctgttagaaaatttaagaataaacctttaagtgaagacgttgttaaaaaattggtagaagctggacaaagcgcttcgacgtcaagtttcctacaagcatactcaattattggtatcgatgatgagaagattaaagaaaatttacgagaagtttctggacaaccttatgttgtagaaaatgtctatttattcgtctttgttattgattattatcgtcatcatttagttgatcaacatgctgaaactgatatggaaaatgcatatggttcaacggaaggtttgctagtaggtgcaatcgatgcagcattagttgccgaaaatattgcggtaactgctgaagatatggggtatggcattgtctttttaggatcattgagaaatgatgttgcacgagttcgagaaattttagacttaccggactatgtctttccattatttggtatggcagtaggggaacctgcagaagatgaaaatggcgcagccaaaccacgcttaccatttgaccatgtcttccatcacaataagtatcatgctgataaggaaactcagtatgcacaaatggcagattacgatcagacaatcagcgagtactatgatcaacgtacaaacgggaatcgcaaagaaacatggtcgcagcaaattgagatgttcctaggaaacaaagcaagattagatatgttagaacaattgcaaaaatcaggcttaatacagcgatagcaagataccaaaataacccgccccctctagcttaaaatgataagtatagctagagggggcgggtatttcttgcaatgaattagtgtgaagttaatgcagcattatcatttgattcgaaagtatctttgtcccaatgtttagttaacttggcggtacctgtaccagctagcattgaatcgttcacgtttaatgctgttctacccatgtcaatcaatggttcaacggagatgagcacgccggctaaagcgactggcaagtttaacgttgacaacaccaatatggatgcaaatgtagccccgccaccgacgccagcaacgccgaatgaactaataatcacgacagcgattaacgttacaataaattgtaaatcaatttctacattagcgacgggtgcgaccataattgcaagcatggcaggataaatgcctgcacaaccattttgtccaatcgacaatccaaatgtcgcagcgaaattggcaataccctccggcacgcctagacgtcttgtttgtgtttgtacattcagtggtaaggcacccgcgcttgagcgtgatgtgaatgcaaagattaatacttccaaagtctttttaacatagcgaatagggctaatgcctaacaggcttaaaataattaagtgaatgatatacatcgtaattaatgcagcgtacgatgcgattaagaattttcctaaagtccaaatggcgccaaagtcacttgtcgataatgtgttggccataattgctaatacaccgtatggcgttaaacgtaagacgaacgtcacaatcgccattactagtgaatagatagcgtcaatcgcacgcttaagcaattcaccatgatcaggttgtttgcgtgctacgcgtaaataagcaaatcctataaatgaagcaaatatcacgacagcaatcgtggaagttgcacgttgtccagtgaaatctaagaatggatttttaggcaataattccaaaatttgttgtggtaacgtatgtgctgttaaatctttcgcttgtttagcaatttcgcttccacgtgcttgttcagcgttaccaagattgattgttgatgcgtctaaaccaaacaccaaggcatacacaacaccaacaattgcagcaatggtgacagtgccaattaaaaagataaaaatgagactaccaattttagcaaacttttctccgatttgaattttagtgaatgcagcgacaatagaaatgaaaattaaaggcatcacaatcatttgtaacagtgcaacgtaaccttgtccgacaatgttgaaccagtcacttgttgatgtaataatattcgaatgtgtgccataggcaagatgcaataacacgccgaatactataccaatccctaaagctgtaaacacacgtttcgcaaaagatatatgtttgcgagccatcatgtgcaatattacgatgaaaatcaccaatacaataatattaatcagtgtaagaaaagcattcatgaacgtcactcctcaaatttttgaatataattccgactagtatgctaagaataatattaattttaaaatatttcaagagggcatttgcaattaaatgtaaacattatgaaattcgacctttggcataagggaatttgtaaacaaatcgttttgaatttagtagagaaaggtgaaaagggttaatatcgttaatagcgttaatagtgttatgagctagtcgattaaagtcgatatttgaaaatgaagcagggcattaaatgcaataaattaaatgagttgtcattacagcgttaataatagaaatgattttaacaggaaaaaagtgatgaacatttggaaaagatatatatcgtgtactgtcatgagagataagatatgagaaaacaaatgtattcctgaatcgagatgtgactatttcgatttgataaaaattgctaacctcatatttattgaataaaaagataataaatgatcaactttgaaaagacgcttcgaacaaacacgttgtaaaaaattctgtcgaatcaaaattagcatcttgtgaggattcgtgtgtgcaggtggtagttcaaaagctaccgtaaacaaatatttttgtttgagcaaaaaggcgtttgtagtaaatgtgaatatgagtgtgctcttgtgcgattcgtcagttactaacacaaccaaacatttaaattgaatgggcttataagatgaatctatttaggaatacacagaagccatcccatttaaaagtaacatactacaaaaatttattcaaaattcaatattaatcataatgaataattaaaaaacctgaaacaaattagtttgatatgctctcttcaaagtagatattgaaaggagtatatcagcttgtttcaggttttatgaattgagtattaaatttgaaaataaaatacagttctataggtttataaaagatcagtttttaaatcatagctatacattactgagtcttaaacttgtgttcaaatcataagtttataggttgaataaacgtgcgaagaaaccttttttctcttcttgaggtttaggttctgccatttcagactgtgaagctgtgctgtcattttctgctttcgcttccgatgaatcgttcgaagtaacttgtttagaagcttctgcatgggcttctgctacttgttgttcagcatcatgttgcgcttctgcatctactgtagcttctttatttgaagtctcagctgctttgtcatttttagactgctcaacgctggctgtttcaattgcttcagttgcagaaatttgatcctctttatctactttagtagcagtgccatcgcctgcattttctgctttagtatccgtcttggcgtctgttgatgtattcactccagcaaccttcgaatctttactgtcagctttatcttcagtaacagcattattttcaactttatttgttgattcagccaatactttagcttgagatgcttgtgcttcttggatagcctcttgtaatgtttggatggcttttaaggattcactatttgaatcgattttagttgtaagttgattttgaagttcttttaattcttgttgttgctgatgtacttgattcatcatttgaccaagtaggtgacgttcttcgcgcattttctggatttctagacgtaaatcttctactaattgagcaacattttgattagtaggtaagtttttgtcatcgtttttgacaatgacttgcaggaagtctttttctttttctaattcatcaaacgctagatcataactatttgtttgttttactttgtcggcaatgtctttgaaaagctcgatatcttcttctttgaaatcagttgcttcacgaccacgatattcagtcttgcttagttggtaaccacgttcttctaaatgttgaacaattttacggacttgcttctcacttagttctacgcgttgtgcaaattctttagttaacatactttaaagtcctttctgcatatactttatgtatactgacgtttgtctacgggcagtgaaacgtcagtcttgcttcatacatagtttaaacgttattgttagtgatttcaagtttgtttaaaatggtttacgtaaatccatttcttctaataaagcataaataatttcacgtgcgataccattggcaaatacatacttcaaaatataatttgatttaacacttgtaccgtagatatcctttgtcagtttaatatttttctttaaaaataagtccacttttttagtgtgaccatcattagttggatgaatgtaatcaatttcagtttgtctttcaaattgatgttcgtataaaaactgtctacggtgttcaataatgagtccgttatcttgtgttaaatctgcaggttctttagggacttccatcattaaaaagttaatacttctagaatgaacaaggtttgataataagtttagttcatgttcaatttgatgtaatgtttgtgtcattaactcatcatggttgggtaggtcttttgcgaataaataaattaaaaatgcagaattggttgtggcttcataatgtgcagttgctagactgacaacaacatcgttttctaagcctacgataaagacataatcgttttcagttttgttgttttctaatgagcgtttgatgatacgtttatcttcagttaaagataaatttaacttagtatcgtaaagtttaagtgcttcgttataatgtggatctttgacagattgaatggttttaaattccataagaacacctccccaatttaaataatattatagcataatcgcctgttgtaaaagactgttcataaacttttaaatggtataaaaaactgtactatctcaaattagacagtacagtaatctcattttgaattaagtgtgataactaagctttgggacctttagatgcttcagcaaaatgtgtaatatcaacttcttcataagctgaattattttctagtacttcttggtgagatgaatgatcgcgaacgccaacaactaacattttatcgtctaaaataagttgtttatatttttctagttcatcaggcgctaagttgtagcgtgataaaactgcatgttcaccatcttctcctgttaacagtttagtcattttatcactaaatgttccacttgttgagataagggagatttcagagtcgtgtaagtcatttaggtgtaatttacttttactaataattgttagctctgattctaaataaccttcagatttcttttgattgattacgttgtataattcgccagtgtcatttactacagtaatatctgccatagttgtcgcccctttaaaaatttgtttattcaatcttttacccttcttattataaaataaaacccttacattattaagttataagtcttcattcgcattaaacgtctctattcatttataaaacgattaaaagattacctaagcagttattgaaaaaatgccgaaaatttgctattatcgttaaataatttacataaactcatataatctaaagaatatggctttagaagtttctaccatgttgccttgaacgacatgactatgagtaacaacacaatactaggagtagcttcagccattaaattgtaaccatggtgggtgatttatatcattttatatgatggtcacagtttatttgatgaaacttcttttacattgattgcatgacaaattcgttatgcatgttcgttcactcataaaccctgaaactattatttagtttggggatttttttgtatctagcaccaatttaagagcaaaatgtttcacacaaatctgaggaggttttaagagtggagttactaggacaaaaagtaaaggaagacggcattgtcattgatgagaagattttaaaagtcgatggatttttaaatcatcaaattgatgcaaagttaatgaatgaagttggtcgcactttttacgagcaatttaaagataaagggattactaaaatcttaaccattgaagcttccggtatcgcaccagcaatcatggctgcactgcattttgatgtgccatgtttatttgcgaaaaaagcaaaacctagcactttgacggatggttattatgaaacatctattcattcatttactaaaaataaaacaagtacggtcattgtttcaaaagaatttttatcagaagaagatactgtactcatcatcgatgactttttagcaaatggtgatgcttcattagggttatatgatatcgcacagcaagcgaatgctaagacagctggtattggtattgttgttgaaaagagtttccaaaatgggcatcaacgtttagaagaagcaggtttaacggtttcttctctctgcaaggttgcttcactagaaggaaataaagtgacattggtgggagaagaataatgaaaaatttaatcctaagtgttcaacatcttttagctatgtacgcaggtgccatcttagttccaatcattgttggtacaagtttgaagtttacgcctgaacaaatcgcttacttagttacagtagatatatttatgtgtggagttgccacatttttacaagccaataaagtaacaggaacaggattaccaatcgttcttggatgtacattcacggctgttgcgcccatgattttaattggtcaaacgaaaggaatagatgtactttacggttcgctatttttatcagggatattagttattatcatcgcgcctttcttttcacatcttgtaaaattctttccaccagtagtaacgggtagtgttgttactatcattggtatcaatttaatgccagtagcaatgaattacttagctggaggtcaaggtgcaaaggactatggagatgttaagaacattttgttaggtttaatgacattaatcattattcttgttttacaaagattcacaactggatttattaagagtattgccatattaattggactcgttttaggaacgataggtgctggcttacttgggatggtcgatattaatcaagtcaatcatgccggttggttaggcatcccagtgccgtttagattctcaggatttagctttgatgtgacatcgacgttagtgttctttattgtagctatcgttagtttaattgagtcgacaggtgtctatcatgcgttaagtgaaattaccggtaagaagttagaaagaaaagattttcgtaaaggttatactgcggaaggtctagcgatagtgttaggttctatattcaattcatttccgtatacagcctattcgcaaaatgtaggacttgtttctttatccggtgctaagaaaaataatgttatatacggcatggtcgtgttattacttatatgtggttgtatacctaagcttggcgcattagcaaatatcataccgctacctgtgttaggcggtgcgatgatagctatgtttggcatggtaatggcatatggtgttagtatattaggacatatcgattttaaaaatcaaaacaatttattaattatcgctgtatcagtaggattaggtactggtataagcgctgtaccacaagcatttaaaggtttaggtgaacaatttgcatggttgactcaaaacggaattgttttaggcgcaatctctgcaattattcttaatttcttttttaatggaataaagtataaacaaacagaagaaaatgtgaaataatataactaattaatttgaaaaatggaggctgtttttaatgtgggaaagtaaatttgcaaaagaatcattaacgtttgatgatgtgttattaattccagcacaatctgatattttaccgaaagacgttgatttaagcgtacaattatcagacaaagttaaattaaatattccagttatttctgctggtatggatacagtaactgaatctaaaatggcgattgctatggctcgtcaaggtggtttaggtgttattcataaaaatatgggcgttgaagaacaagcggacgaagttcaaaaagtaaaacgctcagaaaatggtgtcatttcaaacccatttttcttaacgccagaagaaagcgtttatgaagcagaagcattaatgggtaaataccgtatttcaggtgtaccaattgttgataataaagaagatcgcaacttagtaggtattttaacaaaccgtgacttacgttttattgaagacttctcgattaaaattgtagatgtaatgacgcaagaaaatttaattacagctccagtgaatacaacacttgaagaagcagaaaaaattctccaaaaacataagattgaaaagttaccattagttaaagacggacgtctagaaggtcttattactattaaagatattgaaaaagttatcgaattccctaatgcagcaaaagatgaacatggtcgtctacttgtagccgcagcaatcggtatttcaaaagacactgatattcgtgctcaaaaattagtcgaagcaggtgtggatgtcttagttatcgatacagcacatggtcactctaaaggcgttatcgatcaagtgaaacatattaagaagacttacccagaaatcacattagtagctggtaacgtagcaactgcagaagcaacaaaagatttatttgaagcgggtgcagatattgttaaagttggtattggcccaggttcaatttgtacgacgcgtgttgtagcaggtgttggtgtaccacaaattacagcaatttatgattgtgcaactgaagcacgcaaacatggtaaagctatcattgctgatggtggtattaaattctcaggagatatcattaaagcattagctgctggtggacatgcggttatgttaggtagcttattagcaggtactgaagaaagcccaggcgcaacagaaattttccaaggtagacaatataaagtataccgcggtatgggctctttaggtgcgatggaaaaaggttcaaacgaccgttacttccaagaggacaaagcgcctaagaaatttgtacctgaaggtatcgaaggacgtacagcatataaaggtgctttacaagatacaatttaccaattaatgggcggagtgcgtgccggtatgggttatactggttcacacgatttaagagaattacgcgaagaagcacaattcacacgtatgggccctgctggtttagcagaaagccacccacataatattcaaattacgaaagaatcaccgaactactcattctaattaagataaaggagaacgacaaatatggaaatggcaaaagaacaagagttaatccttgtcttagactttggtagccaatacaaccaattaattacacgccgaattcgtgaaatgggcgtttatagtgaattacacgatcatgaaatttcaattgaagaaattaagaaaatgaatccaaaaggtatcatattatcaggtggtccaaattcagtttatgaagaaggttcatttacaattgatccggaaatatataatttaggaattccagtacttggtatttgttacggcatgcaattaactactaaattattaggtggtaaagttgaacgtgccaatgaacgtgaatacggtaaagcaatcattaatgcgaagtcagatgagttattcgctggcttaccagcagaacaaactgtttggatgagtcattctgataaagttattgaaattccagaaggctttgaagttatcgctgatagcccaagcacagactatgcagcaatcgaagataagaaacgtcgcatttatggtgtgcaattccatccagaagtacgtcatacagaatatggtaatgacttattaaacaacttcgtacgtcgtgtttgtgagtgtaaaggacaatggacgatggaaaactttatcgaaatcgaaattgaaaagattcgtcaacgcgtaggagaccgtcgtgtattatgtgcgatgagtggcggcgtagattcatctgttgtagctgtactattgcataaagcaataggtgatcaactaacatgtatctttgtagaccatggcttacttcgtaaaggtgaaggcgacatggttatggaacaattcggtgaaggtttcaacatgaatattattcgtgttaatgcgaaagatcgctttatgaataaattaaaaggtgtttctgatcctgaacaaaaacgtaaaatcattggtaatgaatttgtatacgtatttgatgatgaagcatcaaaattgaaaggtgtagacttccttgcgcaaggaacactatatacagacgttatcgaatcaggtactaagacagcacaaacaatcaaatcacatcacaatgttggtggattaccagaagacatggaattcgaattaatcgaaccaatcaatacattgtttaaagatgaagtacgtaaattaggtattgaactaggtattccagaacatttagtatggagacaaccattcccaggacctggtcttggtattcgtgtacttggagaaattactgaagataaactagaaatcgttagagaatcagacgcgattttacgccaagtgattagagaagaaggtcttgaaagagaaatttggcaatacttcacagtgttaccaaacattcaatcagtaggtgttatgggagactaccgtacgtatgatcacacagtaggtattcgtgcagtaacatctatcgacggtatgacaagtgacttcgcacgcatcgattgggaagtcttacaaaagatttctagtcgtatcgtaaacgaagtagatcacgtcaaccgcgtagtctatgacattacatcaaaaccaccaagcacaatcgagtgggaataattatatatagcaaatgataggctggagttaccgtaattacgcggtttccagccttttttattttgcgttgaatacgttttgaatacgttatgcttaaaaattgatgtattttgcgaatttatcagccacctgatcacgttgtttttcagttacgtgagcgtaaatatccatagttgtcttgatgtccccgtgacctaatctgtcttgtacttcttgaatagaaaggccagcctcgaacaaaagagaacaatgagtgtgtctaaaaccatgaactttaattctcttaaaactattcttctcacaaattaagtccaatgctttattgcaatgctcgggatatagtggtttattatcacgtacagtagtgaaaacatgttgatgtttatcagaggtattgtgaccatatttaagggactccactctttgatgagtgcgccatgatttcaatacacttgcagttttatcatcaatacttattgttctgtgagatgattttgttttaggctcttgtattatcagtttataatttgcacctcttgcgcaagtcttattaatagatatggtttgtttagtaaaatcaatatccttccatgttaaagccattaattctccacgtctaaagccagtaaaagctaatgttcgaaaaatagcataatataatgggtcatcttcaacaaaagttaaaaactgtttcaattcatcacttgaataatactttgtagatgcgtcttgttgcgcttctttttttctaggtgcttttgtatgtgcaaacggattatcaacgattatcttaaggcttacggcatatttaaacacattagatgtgtatattcgtatagctttaatatcagaatactttttgttccatttattaataactttttggcaatatggaacggttattttcttaataggtacatcttggaaatgttctaatatagctgtatcaaataaagttaaaacacgttgatatgtgctttctcttacagtattttgatactgttcaagccacaactcatatacttctttaaacgtcgttatatcgttgtttagaaagccattttgacttacttctgtttgaagttttgcctcagcaattttagcttctctttcagtcttaaagcctcgtctagtggttctcttttgcttaccagtaattggatcagtacctaaatatgcgacaaacatataggcagtcgaaccgtctttcttcttatattttttaatcatataaatcaatcctttctattgcttgcaacgcgtgagattggattgacacgccgttaaggaatggctaccttgtggcgtgatgattaattagtgtctttttcaagtatgatttttttttgatgttctagtctatcaggatattcatataagtataatttatacattggcttacctttaatagcatcataatgatggttaggaaccaagcgtaacttttcacctaaataaatggattcttcttttagtttttctatttctgctaatgctttttttctatcgttatgagtttctaagttggtgaataatagttttaaatatttttcgtgaaattcaccaatttcttctattgttacttctctttttttatcgcttgattttcgagtatttgctaaagtctcgtaatttattattgatttttctgtatcagtggaaaggatttgtttgtacaacttaagtacgtaatcataatctatgtcatttacattgattttagattctttcaacaattccaacaatttgattgtttcatcatataaatcgtatgatgaataataaatgtcgccgtcattataataggctttattaacataactatacattttatcaaattttgcaaaatcatttaatgttggactataacctttttctttaaactcatctgatattctgtgtagaatatagctgggtatacctaaacctttaccgtagatttcaatttcatttactccaatgtttctgttgccgttctcgtgatttgaaatggtgttttgactaaatcctgtcctttcgctcaatttgctttgagttaatttcatgtattttctaagagttttaataattgtgccgtaatgtgttggtaattctgccatttgaccagctccttctatccaaatgatatcatatcgaaaaaaatatctcaatttgcaatatttaatgttgaaataaatatctcgatgtgagataatttgtttgaggaggtgagaatatgtttacgaaaaaatcagaattaaaacaacaatttttaaaacctaaaaccaaattgaaagaggagaggttaaaacgaggtctttctgctacttatttagctcaattaataggtattgatagaaggcaatatgaatctaaagaaaaagggttgttctcatttcatgactatgagataaaaattatttctgagttccttgatattgataaagaagtcttttttatctgaatataaatatctcaattagagataaaatggcaggagaggaataatatgagccaactacttagtgaacaggctagtcaacagttagttaatagtatagttgatattgccgaaaaaatagctttagaaaaagttaagcaatcacgtaagcgatatctcattcaaaaagaagtcatggaagaatacaacgtgactcacaaggttataaccgagtgggaaatgatgggacttcgtaaagttaagattggtaaaacaattcgctatgatcgacaagatatcgaaaatgtaattgaacaaatgaaaaattgaaacgcctgcaacgcgtgagaactctaacttatcaggaggcaaggcaatgaaattgaatttactgtatataactttaacatcgttattgacaattttattactcgcaatatctaacacgtatgttgcttttagtacttatgcattgttgataacttatggatttaatttaacaggaggattagaaaatgaataatgaacaaaaagaagttattcaagacatctataatactttagaagcagtagcttataacacatcaatggaatacatccataattgcgtagatggtaagaaagaatggacggaaaacgtaaatcgtgaggaacacttacaagccataatcgagtgggcattacaacaaatagaaaataactttgattttgataatgatactgaagtggaggaactataaatgaattgggaaattaaaagtttatttagcgatttaaagttgttgaaagatagttttgaggatttaaaagataatcatggttggtattttgataagttatatccacatgaaccaaatcatgttttaaataaaaccgaagcgattaaagaaggactttcttatcatgagagacgtattcacaataatcaaatgtttgatttattacatctctatacaaaacagtttgatagtattatccaaaagtttcatgaattagaaaaagcgtcatctttcgccgaccaaagccaagataacgcataaaaaataaaattttataaaaatatactatttatattttaacattaattgcattgaaaatacagagaaatcagattagaaaggaggcattctgtggcaattaagaaaaaagatagaattattggagttaaagaattagaaataccgcaagaattaaagttagtgcctaattgggtattatggcgagctgaatggaacgagaagcaacaaaattatggaaaagtaccatatagtattaatggttacagagctagtacaaccaataaaaaaacatggtgtgactttgaaagtgtaagtattgaatatgaagttgatgagcaatatagcggtataggttttgtattaagtgatggtaataattttgtttgcctagatattgataatgcaattgatgaaaaaggacaaatcaattctgaattagcattaaaaatgatgcgactcacatattgtgaaaagtctccaagtggtacaggattacattgtttctttaaaggtaaactaccagataaccgtaaaaagaaaagaacggatttagacatagagttatatgattcagcgaggtttatgactgttacaggatgcacaattggccaaaatgatatttgtgataatcaggaagtattaaatactctcgttgatgaatactttaaagagaatttgccagtaaatgatgttgtgagagaggaatctaataccaatatgcaattatctgatgaagatattataaacattatgatgaaatctaaacaaaaagataaaattaaagatctattacaaggcacatatgaatcatattttgagagttcaagtgaagcagtacaaagcttgttacactatttagcgttttacacaggtaaaaacaaacagcaaatggagcgtatatttttaaactacaataatcttacggataaatgggaaagtaaacgaggtaatacgacttggggacagcttgagttagataaagctataaagaatcaaaagacaatttatactaaatcgatagatgaatttaatgttataccacaggggagtaaagatgttaaacagttgttgaatcaattggggcatgaagaaagaacaaaaatggaagaaaattggattgaagaaggaaaacgagggcgaaagcctacaacaattagccctataaaatgtgcatatattttgaatgagcatttaacatttatactttttgatgatgaagaaaatactaagttagctatgtatcaatttgatgaagggatatatacacagaacactacaattataaaacgagtgatttcctatttagagcccaaacataatagtaataaagctgatgaagttatttatcatttaaccaatatggtagatataaaagagaaaactaactcaccatacttaataccagttaaaaatggtgtatttaaccgtaaaacgaagcaactagaatcatttacacctgattatatatttaccactaaaatatctactaagtataatccgaatgttgtcagacctaatttgaatggatgggattttgatcattggttatatgagattgcatgtgctgataaagaaatagtgactttattatgggaagtcataaatgactcaatgaatggtaactacactcgtaaaaaggctattttctttgttggtgatggaaataatggtaaagggacgtttcaagaattaatatcaaatttagtaggatataaaaatgttgctagcttaaaagtaaatgaatttgaccatgaatttaaattaagtgtactagaaggtaaagcagttgtaattggtgatgatgtaccggtaggcattaatattgaagattcatcaaactttaaaagtgttgtcacaggggattcggttttagttaatgtaaaaaataaacaaccttatagaaccgaatttcgttgtaccgttattcaatcaacaaatggcatgcctaagttcacagataaaacaggtgggacaaacagaagattattaattgttccattcaatgctgattttaatgattcaaatgaaaatgttgatattaaagaaaaatatcttaaagataatcatgtacttgaatatgtgttgtataaagcgattaatttagaatttgataggtttacaattcctcaagtatctaaaaaaatgctagaaatatacaaacaagataatgattcggtttatgatttcaaaattgaagaatttgatcaatggaatattcaaaaagtacctaagaaagttgtttattacaggtatagagcattctgtgaagaaaatggatatatgggaaaaatgtcagacagaacattttatagacgatttgagaagtacttaggaaaagaatggaatacggatgctaaatgtagatattcaagtatcgatgaattagaagaaattgtaggatatatcaatagaacattaatgccatttggacaacagcatagatcatataaaaatgaaaatttaaaaatagtgtgactgagtgactggggtgagactggaattttttagttcagtcacacctataaacactgttgttacaggggtattaccataaaagtgactgggggactagaaatttcaaaaatactttataaaaaactaaaagaagataattgaagaagagtatataaataagtagtttgtgaaaatttcagtcactcagtcacaattttactgtaacctttggtattactgtgtttatagtgtgaccaaagtattttgttttagtcacaatttcgattatttcagtcacgacgaaattagaggtcaaaaatgactaatgaagaacttgcagttactcaaaattgcctaagttactaaaaaatggaattgtagtaacttttagtatctaacgtgggtgatttagtaactggatagattggaggacgagagtaacatgaatagaaatagaatgaaacaaatcatcttagaatatataaagaacaatgacagcacttcatttgtagagattgagaatgtatttgaagaacaaggttttaaatacaaaggtaacggcgcatataccagtggcaaccataagaatattatattttggatgggttggaatgaagaagcgtttaatattgtggcagatttaaaacgcgacgggctaattgaaatgcaaatttgtccgccaatgtactatcttattgatggtaaaggtctaaggctaccaattgtaaagaataaaaatataaaaatagatcattggctaccagtaacatttagtttagtaaattaaaacatgcagataagcatttaaaatatcaagtatagatatgggagtgtgtatatttattaatcataaaagaatcgcatatcaaataatcaaacatacacctgtgaacgttcaattaatgaatacgaaatatataaatcgcgttgtaaggcgctatacaaaaaagcgtgctgattttgaacttattaaaatgtacatctatcagattaaaaggagagaggcaagacgtgctagatcatacaaatgaatctgtaaaacgtgtgtttaagtatagagataagcaagaactattaaataagtatcatgaattattagacaaatactttcttcataacatttcgttctatgaagaagataaaaacaacgaacgtatatatggtttagttgttcatactaaaaacaaattaggagatgaagattatgaaagagtttaaagaacaatttgggtatcaactatctaactttgatgatatggatattaaaggatatgccaatctatatcaaaaggatataggcaaagatgtaagtatgattgaacaggggttaaagcaattaagcattactgaaacagaagttttattaccagagcaaattaacaaaaaattattaggagtgttaaatatgaatgaagtaaatcaatcaagtaatacatgggtaggtacattaacaaagcaattagtgagtagtgagaataactttaatattcaagagttaccgactgcacgtaaagaagtatttaaagagttattggtgaatcgtgagctacctcaaacattgcgtgatgtgatcactattacagatgatgaacatgttgaatctataccagcactatcatacattaaagataagttagctactaatggtattgagctatcacttaatggtagtagcaaatactttgatagacgtgagggacatatctatacagaggtagcagacagtgtagtacatggctctgatagaacattagatgatctacttaaagagatatttattaatgagtgtgtctcatatgaaacaacattactattagataagaacaatgcgagtggattaattgataaagataaccaagatttatcactatataatcaaggtattaaagaagtaagcaatacctcaatgtatgatggtatcaagcaagcgatgaaagatataccacaaacgtttagacgaaaagtatctgttgtaatgaacacagaacatcatgataagttaattaaagagttggcacagatggggttaggtacgcttgcaggtgatttaactaagctatttaatgtatctcacgtagtagttacagatgatgcacaagatatctttgtaggcgactttgggcatgctatatatgctaagtacgagcctattatgtacaacaaaaagaaacaagcgttaaaaggtgtataccaatttgcattgaattacgtgttcgatatcaaaattgtgccagagttattgagaatcgttaaggttaaataaaaaatatagccccctgcccattggcttaaaatgttttttcgccgggtaccggcgggggcccttcgcttgcaacgcggataaacttttatgaaagggggataacttgatttatccctttttcagatacttataaatattaaattcgatatgtaaaggtgtggttatttggtatctgactttgaaagcaatgataaaatcactgaagtagaacttttaatgcattacaatccgaaagtcattaatagcaaaattaaagcgatgagatcacaaatagaaagcttatatcacttgaacatgaaccatgtgatcacgaatgataacgatatgctggtatctgtatcatatccattagataaattagtactttatattatagaagagaaagataaatttgaatattacatgaaaacggctcaggataggctaaatttgtttaaagatatcatcaaaaactattctgaaaatgaacaacaggatgttatgaggtacatgttaagtagtgggaaagttaaaaatgaaggagtcattgaacgtttaaaagtagatatttataaagttgaaagtagaaagcgtcaagaacgacaaaaccagcgagaagaattacatcgaatagagtttaataagcatttagaacaagttaaaaaagaactttcatagataagcatgatattaacgggaatattcctatattcattaatattggtgaatgggacggagatgatgaggagttagataaggcagtgaaagatgtatctaacaataatcctaatcatactgtgattgtggatgatattccgttagaggattgatttataggatattaaccagattctaatttattatataaaaaatgtaaaagtgaaaaagtaagggttacaagatatagtatactatctaatgaataaatatttttacagttataatgcgttatactatttgaaaatgaaatgttgatatattatgtaaaaaaattgtttttatagataggagaataattatgacaaacatcaaagaattaacagagattcccaagatcgaactacattgccaccttgatggctctgtaagttatgaatatttgaaaagccaatcaaaaaagcaaaagattcaaattgacatgaataaggttacagttggagagcattgtgagagactagactactatttaaaatcttttgatgagatattaaaggttatgcaaacagaagaaagtttgattgagagtgttttggatgtagtgaagcaagctgaacaagatggtataaaatatatcgaaattagatatgctcctaaactacatacacagaaaaatttaaaaattttagaagtcttattagcggtatgtaaaggagcggaattggcagaaagtcaatgtgatgttataacaaggttaattgtttgtggaatgaaacactattcaaactttgaaaatatagaaatactcaaacacgttttaaaaaataaagatttacaacaatatattgttggcatggatttggctggtggagaagaagacaactctataggtaagtattcagaagcaattgaatatgccaaaaacaataattttaacataacaatacatgctggtgaatgtggatgtataaaaaatgtgtacgattctgtggaattgggagctaaaaggattgggcacggggttgcattacttaaaagcgaacaagaaattaaagaattttcaaaacgaaaagttttactagaaatttgtcccaaaagtaatgttcaaactaaagcaataaaatgcttggaggatttggatatagaattattaaaacaatataatgtgccatatttaattaataccgataatcgaactgttacaggtaccactttaataaaagaatatcgattgctattggagaataatttaatttctatggatgagataaagagaattaacaaagaagcaattggatatacatttatcgacaagtcagaaattgaattgttgatgaaaaaaattttatagagcgtattttatggttaattagcaatttgaggcgctattattattaattgttaactcgatttaataactttaggttattaataatagtatgttaataaatgaaatcaacaagatagaatataatgataggagttgaatgaaaaggagaaattaattatgaaattaaaaaaatgcataatgactaccgcattagctattggtgtagctgcgtcgtcaattggagtatacgagggttctgctaaagctagtacagataaacaaatcactgcaaatgaatattatgatcaaaagttagctaaagaattaaaagatttacttaatgaacttaatgtaaatgttttagctacaagcagcttagatccatattataaaagaaatgtacagatgtatggtttcaaagcaaaaatggtagtaaagtctaagaattattcaaaaatgtcgatagcgaaagaagagcttgaaaatatttatcgtgaaatagatgaagctctagctaattattactaaaaacacccatttgggtgttttttatgtagagattcaggtatataaatttatttaatggtaatgaaaaatgaaagtccaacttttgtcgagaaattgaaaggtgcaagttatcaagagttggaatcttaacagattattaaatcttttttattattaattaaaaaatatttaataatacttttctgatctgtggtgtataattctttttcggcgataaaaattaaggaaaggtacgtttaaattaaggagaatttacagttgaagaaaaaagtattaattttaacattgggagcgttgtgtgcttcacaactttggaatagcgataatgcaagtgcaattgtgactggagaagcaaacgtatataaatcatcatctttaaatgttggaggatatgttagtagttctgagcaagccaagagatacttagatagtttggatgatttaatttactacaactctgtaaataggcacgcaggatatgaagaacctgaatacaaggaagtatacgataagtatcaaaaaaagttcctagctgaaatagatgcagttaataaatttagacaagaacagaaaaaggtagataactataatagatatgatagaaataattatttatacgggctaacttatgaaagatatataaatgtgtacaatagtttgaaagcaaatagagaagattttgataaagaagtaaagaaaattgaagataagcatgaagatttaatgcgtttttatgaaattaaacaggaacaagtaaatcaagaaatgaataaattggaaaatcaaattttaatgataggacaagcattcattaaaactaatagaaaagcagttttagatatgtataaccgtttagatatggtggtgggaacaacggaacaggaacgtcagaatatgctccctactaatgaaagaatgcgcaaaattaaaatagaagacttagaaactattatcgatgaattttttaatgatataggtgaaaagagaccggataatatacctgcattaactaatgatgaacacaaaaacaaggaaatgattacaaaactaaaatctgacacagaagctgctaaaaaagacgtttcaaaaagaagtaaaagaagtttagataaacaaaagcataattctttatcagaagaagtttcagaagaacaaaaagttaaatataataaagaaatggaagaaatcaaggaaaagtttttagctaaatctaaacttagaaacccagtggcttctttaattgatgatgaagatgataatggaaagcacaagcaactaattatttctacgccaacaaataaaccaatagcaccacctacatatactgaaacgacaacacaggtaccaatgccagtattagagcgtcaaactcagcaacaaattatttataatgcaccaaaaccattggctggattaaatggtgaaagtcatgatttcacaataacgcatcaatcaccaacaacttcaaatcacacgcataataatgttgttgaatttgaagaaacgtctgctttacctggtagaaaatcaggatcactggttggtataagtcaaattgattcttctcatctaactgaacgtgagaagcgtgtaattaagcgtgaacacgtgagagaagctcaaaagttagttgataattataaagatacacatagttataatgatcgtgttaaagcacaacagaaagttaatactctaggcgaagctcataaaaactattttaataagcaaattaataaggtgtataacggtaaatagatactaaatataattactttgcttcaattaactctaaaggtcgtcttaagcttatagattttttagaatgatattgataatgtttgattgtattgagcaataggaaaggtatatgtaacctgttaataatagatactgagaaaaacggtattgcaatggtaaacgatgaggtaatatactccaaagtgaaatgtatgctgagttgattgtggtaaacggtgaacatacctaaattgagtggcagagctgaagctaaaatatggattgtattggcataagtcagctgaacacacactatagattaacgttgttcaacatttttgtatagttttcgggctatttatttgttattatttaaatacatgcatgtatcctcagttttattttgagagagcccacgcatgtcactgggctttcataatacttttcttcataatagtaattgtatgggcaggtacttcgatgcttgcctattttttatgttataataattttagacgttttcaaggagcgtctctttagattgtatattatagctagccttcgggttagcttttttgttatgatatgttatacatgcatcaactatttacatctatccttgttcacccaagcatgttactgggtgttttttcttacgatagagagcatatttttcatactactcccccgtagtatatatgactttagcattcccgtataatagtttacggggtgcttttatgttataattacttttgtatagtaggagtgaattatatagtccggcagaggccatatatctgactgttgttctcacaggaggcatcttccttgtcatcactcgatacatatatcttaacaacatagaaatgttacagtcgttacaccatccgttatatgggtggtttttttctcataaacttctatttcaaaatgacttcatgtggtaataaaatttttctcacacgttgcaagcagtgaatacgtaattgaatacgttaattgttaagcgatgtgaattgttgagaagtatagaacattaaaattcttgatatatcaatagttataaactgatacaaactaacgaaaaatacttatttcattgagtgggaataattatatataataaaaccacctgtttgcacgggtggtttttaatttgagtagttggaaaattacaataaggacggaaaaggggtaaggtgttctaagtttgcgttttaattcatcaataaggcaattttccgtgtttatttttatataaaatttcatattgtttaggatcttcttgttttaaatcataaattatagtttcgtctactattttttctaattcaagtgtattaaagctccagtcatttgttgttattataaatattttttggactgggttgttatttatatgattaattagcctaggagtatctgtttctattattagagcagattctacaggatagtaaatagcaaagtctccgtgataaattgtgtttctttcatagaggttaacctctaaggttaaattactcaatttgaagattgtgttttgagttatatttttaggaataattcgattatctactatttgttttaggttgcctattgaacgagtgtgtatcgtcccttttgtgtaatcggaattatttaaagctcttaaaacagttgttaatttatactcgttaacataaccctttactaaaaccatccgtttatcgctacctataaaatctttcagttttttgttgaattcattattgttgtgcataatattttatcctttccattagttgattgttttcatttgttcaaatctctatccatttactcggttacagggctgtgtatttgcagagtaataatatgattgaaataaccaacgcgttccgtattcgttttgagtgacgcagctagctgcgataatagtgacatgtggcttataagacattgtgtaatttattgtgtgttttgtgatgtctaatattgattgcagattgttgtatatttcacttaaagggcatttatatcaaaaaagaggccagatgacgtatcatctgaccttcagctaaaacgctgataatatgtcattcttcaagagaatgaagccggaatggttaccgggaatttgtaaatcaattatatcagatgtaatattacaattcaattagaaaagaactttatctttaattgcttttcgatttcattcatgtcatcttctgaaattattatcgttccagtaggatcagaatcatttattttgcttatacgtcttttgcttattgtggtaattgctgatatattaacgtatgtatctttccctttgtgcttggaataaacacctatcactctatacagttcattagctttttgatttaagttagacaaaagctttttatcttctgtgctaagtttaatgtcaatatctctatatttttgggctaatgcttgtactttactactgatatcgataatctgtttttttaaatctgttgctgttagatttagcaccgattcgtttaacttcaaataatttttattacctttggaagaaagtggaactattgtaactgtttcttttcctttattgtctttgttatctaatattacacaaaaatgattaccagaaaactcacttccaatattactccctagttttacatataccactgttcctctactatatgatttataatatctttttttattgcttgtaacatcgctatgtatagtaattgaataaaactctagccaatgaggcatgtatataactttcatgtttttactatcggattttgaataagcttgttttagttttttgtttgacgtatttaatttactatttgcttgattgatatttttagacattaaatagtgttctcctaatcaatttattcttctttatatcagcattattagcactgaaattaacatgaatggtacgaaaatagatgttactataaaaccaacaatttttattaggtggaactcatcaattttgtatttagcaaatttcgcaatgatcttctatttattcgctttttatagttcatgtatgtgtaaaaaagtcaatattgaacatctaattataagcgaattcctaatgctaaaagcaatctaacttacttaaatattattatgagtttttattgaaattaaataaatttaaactatttcttagtctctccatatcgttggaagttggttctttatataatcagataaattagaatcttcaagtaatgtatctttaaaaagttcagtttctaaatcaactctaaaatttgctttaaaacatcatgttccatttttaaatgttgaacttctttgcgtaattttattaactctttttcatcactttttaaattatcttgatgattgaaggatccagtattttggtgttgttttatcgaatttgagaaaattgagggttttaaatcatactttcgtataatttcattcttaagcttaccatttttatataatctaaccatttgtaacttaaactctgaactaaatgttcttctttcttttgtcataataaaattgactactttcttaatttaacaatatctattctcatagaatttgttcaattaagtgtagacgattcactgacacatcataagtacgtaaggaattttgatcgttcattgttattgctttatgttttagggaatgtgctattgaagggtttaaagaggtttgaaatgtcttggtttcttgacttatataattatgaaagagggcgttgtcctttattaaatttctgagattagaaatgctataaataaagtgattaagtttttttgttttcatgtaatttaagaaatggatttgttttttgtgggttatttttaattctattatgaaatggtttgaattttgcagttgcaaatatgatagctgcttcttttgacaaagtaatagaacctttttcttctggtaccatgatatccactccttgtacaattcaatttaagtcttataaaataattttactatgcaattacctttgtgtaaatcgtttcttattgttaccaaattatttgtttaaaagcattatgcaatgccaatcaacaccgaagttctcatgttctctttccttttacgactacatatattgttaataatattggaataataaactgatagtgataatatttatttaacagatccatgagagtaggaacccaaccatatggggatttcgaaataatggtttttttgatataaaggagtgatgtaatggaaaaagtagccattttagtagatggagtatttatcagctaaaaattaaaatagatatgggttttcttcattaaataatttttctataaggaaacagaggcaacgctactgtcacctctgcttgaaataattaggatgaaatactctgagtttatgaacgtccatacccaaatcgctcaaatcctccaaacctccgactacatctccaaacccccaaacaccaatacttaccaaagcattgatataagtgccaatactggcaatgtgccttgtttgaaaaagatactaatattgcttgaaaggccaccataaatagcaacgccaatgatatacactaaaatagctgcgcatagttcttttgggttactactaaaaaacaatccgtatactagcaaaactccgattaaaccgttatatacgccttgattcttcaaaagtacgttaatatttttgtctttcaatttatcgacgcttatattaaatgtctcgctggtctttttggaagttgtagcaatcgtttcaaggtacataatatagaaaaattctaatgccacaaatatgattaaaattatcgagatgatattcactgtaacgctcctttagtattaaatattttcttgtaaaaatgattgcagtgtctgtggttgctcattgactaattgttggaaatcattggattcttggtctaataatcctcttgctcctgcgtcgtacattgatgccaataatgcaccaaagcctttaggttcatcgtacatttctgcaaatgtctctaatgaaacgggttcatatttaatttctgtgcctgatgcttcagataaaattgcagcaagttccttcatatcataactgtagcctgataataaataacgtttgccccaagtatctggatttttaataatagcaatgacacctctagcaatatcatttctagtaatataattaatacgaccatcaccagctggataaatcagtttatgcatcttcatcaattctggcaaatatggtttaagtggatccatgtacattgccattcttacatacgtataatcaatgccacttgttgccaataaacgtgatgcatatccgaaataagggctcatatggaatggattattatgctgatctgcgtaataacctatgaaaatgatatgagcaacgccactttgctttgcggcatatactaaattttccacttcaggaatacgtttaaatgatggatggataatacttggaataaacacaacggtgtcgatgcctttaaatgcttttaccatgctttcttgattaaaataatctaattgtcgcacagaaacttttccgcgccaatcttctggaactttctcaacatttctaacaccaatgtgaaaatgatctatgtgatttgcaatagcttgatttgtaatatgtgtgcctaaatgacctgtagcacctgttaatataatattcattcacttcatctcctaatctttatatacataacataatacttattcgatgattttcaaaacatttgattttataaaaaaatgcaatctgtatttattgtcgccgtgtatagtaaatacgcatatgttattaatgttaaaaataccgtaatgacgcgttttagttgatgcgtgtcaccatgatctttgaaaattttgacatggtactgcgacgatatgatgtcatttttgtgtctgaaagttttacagtttttaaaattaaaatggtataaagtgtgaattgtataaaaatgagtctcgacggataagaattgattaataacagttagcattttattaattaccttaacaatgattcaagtttagttaaatgaggtttaatttgaaagggaatagcgcctcaatataatgtaggtagattgttcatattacgtaattgaaaaatcaaatttaaatagattggggctaaaaattatgaaatttaaagcgatagcaaaagcaagtttagcattgggaatgttagcaacaggtgtaataacgtcgaatatacaatcagtacaagcgaaaacagaagtaaaacaacaaagtgaatcagagttgaaacactattataataaaccggttttagagcgtaaaaatgttactggatataaatatactgaaaaaggtaaagattatatagatgttatagtagacaatcaatattctcaaatttctttagttggatctgataaagacaaatttaaagatggagacaactcgaatatagatgtgtttatccttagagaaggtgacagtagacaagcaacaaattactcaattggtggcgttacaaaatcaaatagtgtgcagtatattgattatatcaatacgccaattttagaaatcaagaaaggtaatgaagatgtacttaaagatttgtactacatttcaaaagaagacatctcattaaaagaacttgattatagattacgagaacgtgcaatcaaacaacacggcttgtattcaaacggtcttaaacaaggtcaaattacaattactatgaaagatggcaaatcacatactatcgatttaagtcaaaaacttgaaaaagagcgtatgggcgactcaatcgacggcactaagattgatagaattctagtagaaataaaataatactttctaacgacaaagcgctatgttgaatcgtgcttgttatggaaatatatggaagttaagcgacgtattgttgcttagcttctttttttgagaggaaagttagaaaactcacgcaaacagtcgcaccacgcattatcttttacttaactagcttaatcatattttatgaatagttaaaaaagggttaatgtgaatatcagcatacagctcctataatatgattgtatggttcaaattacgtaataaaacaatctaatctaaaatattggagcatacaattatgaaaatgaaatcaattgcaaaagtaagtttagtcttgggtattttagctacaggtgtaaatactgtaacggaacaaccggtgcatgccgaaaataaacatgttcaagtaagtcaaaatagtaaaaatttaaaagcgtactatactcaacctagtgttgaatataaaaatgtgacaggttatatcagtagtattcaacctaaaccaggcactaaatttttgaatatgatagaaggtaatacagttaataatctagctttagttggcaaagataaggaacactatcatacgggtgtacatcgcaaccttgatatattttatgttaatgaggataagagatttgaaggtgcaaagtactcgattggtggtatcacaaaagcaagcgataaagttgtcgaccaagtagcagaagcaagagtcattaaagaagatcacactggtgaatatgcatatgactttttcccatttaaaatagataaagaagcaatgacattgaaagaggttgattttaaaataagaaaacatcttattgatcattatggtctttatggtgaaatgagttcaggaacagttactgtccaaatgaaatattatggcaagtatacaattgaattggataaaaagttacaagaagaccgaatggccgatatcgtcaaagtcatagatattgatagaattgaagtcaaagttaaaaaagcataatacttagattggtcgtcgtaatgaattgaaattgcaatagtgaggttaagtgatgataaaacattacttaacttctttttttgtcttaaaatcatttctatgatacgtagtaacaccacataaacctcgaaagtactcattattttttgcttaaatgacttaataatacttcaacaattgttaaacgagggttaatgtgaatagaccaatatgtcctctataatgaagttgtatgattctaattacgtaaagaacaatcgaataattacgattggagcatacaactatgaaaataagaataattgcgaaagcgagtttagcgttagggcttgtaacaacaggcgcaagtatagtaacaacgcaatcggccaatgcagaagtagcatcagcacttaaagcaggacagttagcaaagataagcgtatcaccaagcgcaatcacaacgacaacgcaagcagtgaacgcagaacaaaatcgtacggctaatactgaacaggcatcaaagtctaacacagaaaatgtatcaacatcgccttcaactaaaacagaacagacaccaaaatctaacatacaaaaagcaacacaacaaacaccaagcgtaactacaacaccttcaccaaatgtacaaccgcaatcgccacaaccaacaccaaaaccaacaactccgccatcatctaatgtcgaaacacaacaaccgcaatcgcctaccaccaaacaagcacaaaaggaaataaaccctaaatttaaaggtttaagatcatattatacgaaaccaagtttagaatttaaaaatgagttgggtataattatcaaaaaatggacaacaataagatttatgaatattgttccagattatttcatatataaaatagctttagttggaaaagatgataagaaatatggtgaaggcgtgcatagacatgtcgatgtatttatcgttttagaacaaaataaatatggcgtagacaaatactcggtcggtggtatcacaaaagcaaatagaaagaaagttgattacaacgcaagaataaaaattactaaagaagataaaaaaggtacaatttcacatgatgtttcagaatacaagattactaaagaagagatttccttgaaagaacttgattttaaattgagaaaacaactcattgaacaacataatttgtacggtaatattggttcaggaacaatcgttattaaaatgaaaaatggtgggaagtacacgtttgaattacacaaaaaattgcaacaacatcgtatggcagatgttattgatggtacaaatattgatagaattgaagtgaatctaaaatcatcgtgatggatactgcatagaaccgttgaacgatgaaatgagaagttaagcgacaatggccagcatcattgcttagcttcttttgttttgcgtaataatgttaagggaaaatatttacttgtttgtaaaagtgacatctcaatgtcttgaaaatgatgcaatgcccaatttgcatgcgttgaatcgcttcgaaaccatctgtatttaacgaaaattatggattacttaacgatgattcaaatatagttaaacatggtttaatgtgaatagaccaatacgtcttctataatgaagttgtatgattctaattacgtaaagaacaatcgaatataatagattggagcatacaactatgagaatgacacaaattgcgaaagcgagtttagcattagggcttttaacaacaggtgcaagtatagtaacaacgcaatcggccaaagcagaagtaacgccatcacttaaatcagaacagttatcaatgataagcgtatcaccaagtgcagtcacaacgacaactcaaggagtgaatgcagaagtagcatcagcacttaaaacagaacaggcaataaaatctaacatacaaaaagtgacaacatcgcattcaacaaatgcacaaccgcaatcgacacaatcaacaccaaaaccaacaacaccaccttcagctaatgtcgaaacgcctcaaccacaatcacctaccacaaaacaagcacaaaaggaaataaaccctaaatataaggatttaagaacatattatacgaaaccgagtttagaattcgaaaagcaatttggctttatgctgaaaccatggacgacagttaggtttatgaatgttataccagattggttcatttataaaatagctttagttggaaaagacgataagaaatataaagatggaccttacgataatattgatgtatttatcgttttagaggacaataaatatcaattaaaaaaatattctgtcgggggtatcacgaagacgaatagtaaaaaagttgatcataaagcagaattaagcattactaaaaaagatgaggaaggcaaaatctcacgcgatgtttcagaatacaagattactaaagaagagatttccttgaaagagcttgattttaaattgagaaagcaactcattgaacaacataatctgtacggtaatattggttcaggaacaattgttattaaaacgaaaaacggtgggaagtacacgtttgaattgcataaaaaattacaagaacatcgcatggcagatgtcatagatggcactagtatcgacagaattgaagtgaatctaacatcatcgtaatggatactgcatagaaccgttgaacgatgaaatgagaagttgagtgacaacgatttacatgttactcggcttctttcgtgttgggcagtggtataagaagacgaatattcgatgttgaccgcacataacatacttatgtactaaatgtgtctaaaaataccaatctatcaagcgttgaagtacaacaaaagtcatttttatttaacgaacattatggattccttaatttaattaacgatgattcaaatatagttaaacaaggtttaatatgaatagagacatacgccaactataataaagctgtatgattcaataaacgtaatcgaacaaatctaataattacgattggagcatacaactatgaagatgacagcaattgcgaaagccagtttagctctaagtattttagcgactggggttataacatcaacggctcaaactgtaaatgcgagcgaacatgaatcaaaatatgaaaatgtgacaaaagatatcttcgacttgagagattactatagtcgcgcaagtaaggaacttaaaaatgttactggctatcgttatagcaaaggtggcaagcactaccttatctttgataaacatcaaaagttcactagaatacaaatttttggtaaagatatagaaaagcttaaagcacgtaaaaatccaggtttggatatatttgtagttaaagaagcggaaaatcgcaacggcacagtgtattcatatggtggcgttactaagaaaaataaaggcgcttactatgattacttaagcgcacctagattcgttattaaaaaagaagtaggtgcaggtgtttctgtgcatgttaaaagatactacatttataaggaagagatttcgctgaaagaacttgattttaaattacgacagtatttaattcaagattttgatttgtataaaaagtttcctaaagctagcaagataaaagtgacaatgaaagatggcggctattatacatttgaactcaataaaaagttacaaacaaaccgaatgagtgacgtcatagatggcagaaatattgagaaaatagaagccaatattagataattcaacgaaacatggataatggtaaaatatggatagtatagatgagctaggcagcataggttgcttagcttcttttttgtgtcgttacgatcggaaatgaagtggggcgatgaaagataataacgacaataaaacctgtgaaaatagttgatacctatagtcgcacggtgtcgcattagtgacatgaaacaatgtggaaaacataattaaattgaaggaaagtgtgaatggtgaaaaaaatagcatagagttataaaaaatgattaatactgttaggattccattaattagcttaacgttggttcaggaatagttaaaaagcggttaattcatagcgcagtatccggcttatataatgatagtagattgttcgtattacgtaattgaattaatcacataaacatatattaagtcaaaatttaaaaatagattgggagaataatactatgaaattaaaaacgttagctaaagcaacattagcattaggtttattaactactggtgtcattacatcagaaggtcaagcagtaaaagcagcagaaaagcaagagagagtacaacatttatatgatattaaagacttacatcgatactactcagcaccaagttttgaatatagtaatattagcggtaaggttgaaaactacaatggttctaacgttgtacgctttaaccaaaaagatcaaaatcaccaattattcttactaggaaaagataaagaacagtataaagaaggtctacaaggccaaaatgtctttgtagtacaagaattaattgatccaaacggcagactatctactgttggtggtgtaacgaagagcaataacaaaacttctgaaactaaaacacaattagttgttaataaagttgatggcggaaatttagatgcatctattgactcatttttaattcaaaaagaagaaatctcattaaaagaacttgatttcaaaattagaaaacaattagttgaaaattacggattatataaaggtacatctaaatacggtaaaatcattatcaatttgaaagacgagaaaagagaagtaattgatttaagtgataaattggaattcgagcgcatgggcgatgtgttgaatagtaaagacattagaggtatagcagtcactattaaccaaatttaaagtaagcaatcaatgactttaaagtaataaattttgaggcagcttaacgatgaaacgttgaataaatatgtatatcctaccaaaggagcgtatttaaagcaacgccgtcgttaggctgttttttacatttaataacacaggtcatgagtatacttaaaaaggtatggcagacgtgaaagctacgtgctttgaatattacttaggtgttcattaacaatgattcaaagttatttaaacgcacgttaatgtcagtttgtttcgatgcactttataataaaggcagatgtttcaaattacgtaatcataacaatccaatacattaagattggagcaataaaatatgaaattaacagcgatagctaaagcaacattagcattaggaatattaacaacaggtgtgatgacagcagaaagtcaaactgtaaacgcgaaagtaaagttggatgaaacacaacgcaaatattatataaatatgctaaaagattattattctcaagaaagctatgaatcaacaaacattagtgttaaaagtgaagattattatgggtctaacgttttaaactttaaccaacgaaataaaaatttcaaagtatttctaattggcgacgatagaaataaatataaagaactgacgcatggccgtgatgtctttgcagtacctgaattaatagatactaaaggcggcatatataccgttggcggtataacaaagaaaaatgtgagatccgtgtttggctatgtaagtcatccaggactgcaagttaaaaaagttgatcctaaagatggcttttcgataaaagagttgttctttattcaaaaggaagaagtatcattgaaagaacttgattttaaaatcagaaaaatgttagtcgaaaaatatagattgtataaaggaacagcagataaaggtagaattgttatcaatatgaaagacgaaaagaaacatgaaattgatttaagtgaaaaattaagttttgatcgtatgtttgatatgctggatagtaagcagattaaaaatattgaagtgaatttgaattaattaaagatgatagtataaaaaattaaaaagcgacttaacgataaaatgtgcattgacacccgtacctttgaataagaactgtgttaaatacattattgttgttaagttgttttttgcatttcaaagtacagaacagagtatcaacattagttgtagtaaagagtgactcagccaaacaacgacatgtaaagcgtgaaagtcattgaatatgaacattaaaatatatttgcttttcattaataataattcacgcatatttaaatcgaggttaattatcgcgttaaacgatggacgttataataagcgtatatgattcaaattacgtaataataacaatccaatacattaagattggagtaaataaatatgaaattgacagcattagcaaaagtaacattagcaataggaattttaacgacaggaactttaacaacagaggcccattcaggtcatgcaaaacaaattcataagtcagtaaacaaacatgacaaagaagcattacaccgatactacagtggaaactttaaggaaatgaaaaacattaatgctttgaaacatggtaaaaacaacttacgttttaaatatagaggtatgaagactcaagtattattgcctggagatgagtaccgtaaatatcaacagcgaagacatacgggcttagatgtgttttttgttcaagaaagaagagacaagcacgacatatcatatactgttggtggtgtaacaaaaaccaataaaacatccggctttgtcagcacaccaagattaaatgttacaaaagaaaagggtgaagatgcttttgtgagaggttatccttatgatattaaaaaagaagaaatatcattgaaagaattagattttaagttgagaaagcatttaattgaaaaatatggtctttataaaacgatctcaaaacatggtagtgttaaaatcaacatgaaagatggcagcttttataaccttaatctaaggtgtaaattagcgttcaaatatatgggagaagtcatagatagtaaacaaattaaagatattgaagtgaatttgaagtaaataattacaaataataaaaagaattgaagcggcttaacgatgaaaaggaaattggtacgcacaccttacaaataaggatggatcaatcgacatcgttgttaagccgtttttgtttgcgtgttatgaatcctatcccaatctccataaagataaaatttcaaccaccaacatcaaaattctcaacatcgcaacataaccaaatgttataataaatctattacacaaagagataaattacttattcaaaggcggaggaatcacatgtctattactgaaaaacaacgtcagcaacaagctgaattacataaaaaattatggtcgattgcgaatgatttaagagggaatatggatgcgagtgaattccgtaattacattttaggcttgattttctatcgcttcttatctgaaaaagcggaacaagaatacgcagatgccttgtcaggtgaagacatcacgtatcaagaagcatgggcagatgaagaataccgtgaagacttaaaagcagaattaattgatcaagttggttactttattgaaccgcaagatttattcagcgcgatgattcgtgaaattgaaacgcaagatttcgatatcgaacatctagcgacggcaattcgtaaagttgaaacatcaacattaggtgaagaaagtgaaaatgactttatcggactattcagcgatatggatttgagttcaacgcgactaggtaacaatgtcaaagaacgtactgcgttaatctctaaagtcatggttaatcttgacgacttaccatttgttcacagtgatatggaaattgatatgttaggtgatgcatacgaattccttatcgggcgctttgcggcgacagcgggtaaaaaagctggcgagttctatacaccacaacaagtatctaagatactggcgaagattgtcacagacggtaaagataaattacgtcatgtatatgacccaacatgtggttcaggttcattactgttacgtgtaggtaaagaaacgcaagtgtatcgttatttcggtcaagaacgtaacaataccacatacaacttagcgcgcatgaacatgttattacatgatgtacgttatgaaaatttcgatatacgtaatgatgacacgttggaaaatccagcctttttaggccatacatttgatgcggttattgcgaacccaccatacagtgcgaaatggacagcagattcaaaatttgaaaatgacgaacgattcagcggatacggcaagcttgcgccaaagtctaaagcagactttgcctttattcaacacatggtacattacctagatgatgaaggtaccatggcagttgtactaccgcatggtgtcttattccgtggggctgcagaaggcgtcattcgtcgttacttaattgaagaaaagaactacctagaagccgtgattggcttaccagcgaatattttctatgggacaagtattccaacatgtattttagtatttaaaaaatgtcgccaacaagacgacaacgtattatttatcgatgcatccaatgattttgaaaaaggaaaaaatcaaaaccatttaagcgacgcccaagtcgaacgcattatagacacatataagcgtaaagaaacaatcgataaatatagctacagcgcgacattacaagagattgccgataacgattacaacttaaacattccgagatatgtcgatacattcgaagaagaagcgccaattgatttagatcaagtccaacaagatttgaaaaatatcgacaaagaaatcgcagaagttgaacaagaaatcaatgcatacctgaaagaacttggggtgttgaaagatgagtaatacacaaaagaaaaatgtgccagagttgagattcccagggtttgaaggcgaatgggaagagaagaagctaggtgagtttgctggtaaagttacccaaaaaaatgttgataaaaaatatattgagacattaactaattcagctgagttaggtatcatatctcaaaaggattattttgacaaagaaatttcgaatatagataatattaaaaagtactatgtagttgaagagaatgattttgtttataaccctagaatgtctaattatgctccatttggaccagtaaatagaaataagttagggaaaaaaggggtcatgtcacctctttatactgtgtttaaaattcaaaacattgatttaaactttattgagttttattttaaatcttcaaaatggtatagatttatggcattaaacggtgattcaggtgctcgagcagataggttttctattaaagataggacatttatggaaatgccacttcatatcccatgtatggatgaacaaataaaaatcggtcagttcttcagcaaacttgaccgacaaattgaattagaagaacaaaaacttgaattacttcaacaacagaaaaaaggctatatgcagaaaatcttctcgcaagaattgcgatttaaagatgagaatggtaaagattatccggagtgggaagaaactactataaaagaaattgctcaaattaacactggaaagaaagatacaaaagatgccattactaatgggagttatgatttttacgttagatctccgatagtttataaaattaatacttttagttatgaaggagaggctattttaactgtaggagatggagttggcgtaggtaaagttttccactatgtaaatgggaaatttgattatcatcaaagagtatacaaaatatctgactttaagaattattatggattattgttattttattatttttcacaaaactttttaaaagaaacaaagaaatatagtgcgaagacatcagttgattcagttagaaaagacatgattgctaatatgaaagtaccgcgtcctatttatatagaacaaaaaaaaatcggtcaattcattaaaagagtagacaacaaaacaaaaattcagaaacaagtgattgaattacttaaacaacgcaaaaagtcattacttcaaaagatgtttatttaagtctactggaccttgttttaaaagtaataatggtgtttttcttatactcttaacaattggtttcaattaccaaaattataaaatcaaagtaaatcaaatacgaacattaaatttaggcactgtgatagcacagtgtcttttttgtgtcgaaattgtgtacagaataagtggtcaaataaatattaagttgagataaagtgttattcgtaaataaaagagagtggatcgataggaattgaatgatattagttaactatttattaaattacttaataatgattaatttttagttaaagtaagtttaatgtgaagtacgaccgttgctcattataatgaatgaggattgttcgtattgcgtaatagaataaatcaaatagactaaaaattgggagcatagaattatgaaattaaaaaatattgctaaagcaagtttagcactagggattttaacaacagggatgattacaactactgctcagccagtaaaagcaagtacattagaggttagatcacaagctactcaagacttaaagggttattatagtggaactggatttaattttcaaaatgtgagtggttatagagaaaacgacaaaatgaatctattttcagggtcacaacttaatgtaatatcactacttggttcagataaagaaagatttaaaaatagtgattatagtggattagatgtatttgtcgtacgtgaaggatctggtagacaagcggataataattctattggtggaattactaagacgaataaaaacaattataaagatttcgttaataatgtaggtctagaaataactaaaccaacaggacataatacagcaacaagacaagtggaaacttatagtattaataaagaagaaatttcattaaaagaacttgattttaaattaagaaagcatttaattgataaacatgatctttataagacagagcctaaagacagtaaaattagagttactatgaaaaatggtgatttttatacttttgaattgaataaaaagttacaaactcatcgtatgggtgatgtgattgatggtagaaatatagagaaaattgaagtgaatttataataatattcgagggagtatattatgagggaaaattttaagttacgtaaaatgaaagtcgggttagtatctgttgcaattacaatgttatatattatgacaaacggacaagcagaagcatcagaggctaatgagaagccaagtacaaatcaagaatcaaaagttgtttcacagactgaacaaaattcaaaagaaacaaaaacagtagaatctaataagaactttgttaaattagatactattaaacctggagctcaaaaggtaacgggaactactttaccaaatcactatgttttattaacagttgatgggaaaagtgcggattcagtagaaaatggcggtttgggttttgttgaagcaaatgacaaaggagaatttgagtatcctttaaataatcgtaaaattgttcataatcaagaaattgaggtttcgtcgtcaagccctgatttaggtgaagatgaagaagatgaagaggtggaagaagcttcaactgataaagctggtgctgaggaagaaagtacagaagctaaagctacatatactactcctcgatatgaaaatgcctacaaggtgcctgaaaagcaattagataagaaaaatggacatcatcaagttttgatcgaaccaattactgaaggatcaggcattattaaaggtcatacgtctgtaaaaggtaaagttgctttatctattaataataaattcattaattttgaaacaaatgctaatggtggtccaaataaagaagaagcgaaatctggatcagaaggtatctgaatgcctatcgatgacaaaggttactttaactttgacttcaaaacaaaacgtttcgatgatttagagttaaagaaagataatgaaatctcattaacatttgcacctgatgatgaagatgaagcattgaagtcattaattttcaaaactaaagtaactagcttagaagatattgataaagcagaaactaaatatgaccatactaaagtcaacaaagtaaaagtcttgaaagatgttaaagaagatttgcatgtagatgaaatttatggaagcttatatcatacagaaaaaggtaaaggtattcttgataaagaaggcactaaagtaattaaaggaaagactaaattcgcaaatgcagttgtgaaggtagactctgaactaggtgaatcacaattattccctgatttacaagtagatgaaaaaggtgaatttagctttgatgtagatcatgctggatttagattacaaaatggagaaacactaaacttcacagtagttgatcctattacaggtaaattgttaagtgaaaaatttgtttctaaaaacatagatatttatgaatctcctgaagaaaaagcagatcgtgaatttgatgaaagaatggaaaacacacctgcatatcataaattacatggcgataaaattgtcggctatgatactaatggattcccgattacttggttttatccattaggtgaaaagaaagttgaacgtaaggcaccaaaattagaaaaataattaattaaataaaacagcttaatgatgtaatgaaattagtgagttaatcactgacttcaatgtcattgagctgtttttttatgtgctttgttataaagcattattgaatttattttacgtgttcatattttgaaacatcaaagccgtcttgcttagctttgttgataatgtctttgattgaatgtagtcctttatcggcgaagtatgatcttaagttgtcttttgtagcttggtcagcattcttatctaataacacatcgatataacttaattcatgttctaagaagtttgcatcatcatgtagtacgagtccattttgagaataaactttcgcatctgcttgattactatatccaacaacgccagttgctaatacacctaccattgccgtagctactaaaacctttttaaatttcatatctatcactcctctaaaaattgtaactccatcataacactgaatattgagaaaattacgtttattaagtctatttaatgatttttaataaatagttaaagtgacaaatattgtttaaatgcaattaatctttagtgcgatgattatggattttccctactaaaaccttgtttacaaagagggtttaaatcaaatgaaacaataataaaaaataatgcaacataataataagtacaaatttaattaagaaattaaattgattgtatatgtatattttggtaacgtaaaagagaaatatacaaaataattaattatttatatgaaaagagaatataaatgaagtataaaacagagagacgtgaagcgatgggatatttaaaaaggtttacattgtacataagtatcttgattttaatagttgttatagcaggttgtggcaaaggtaatgaaataaaagaagattcaaaagaaacacaaatcaaaaagagctttgcgaaaacattagatatgtatccaattaagaatctcgaggacctatatgataaagaaggatatcgagatggcgaatttaaaaagggagataaggggacgtggactttactcacaagtttttcaaaaagtaacaaaccgggtgaaatagatgacgaaggcatggttttatatctaaatagaaataccaaaaaggcaacaggttattattttgtaaataaaatttatgatgatattagcaaaaatcagaatgagaaaaaataccgtgttgaacttaaaaataataagattattcttttggataatgtagaagacgaaaaacttaaacaaaaaattgaaaattttaaattttttagtcagtatgccgattttaaagatttaaaaaattatcaagatggaagtataacaactaatgaaaatgtaccgagttatgaagcagaatacaaattgaataatagtgatgaaaatgtaaaaaaacttagagacatttatccaattacaacgaaaaaggctccaatattaaagttgcatatagatggtgatataaaaggaagttcagttggatacaaaaaaatagaatataaattttcaaaagttaaagatcaagagacaacattaagagattatttgaattttggaccgtctgatgaagatagctaaagataattagatgtagaaataattctaaaacagagagacgtgaaacgatgggatatttaaaaaggtttgcattgtacataagtatcttggttttaatagttatggtagcaggttgtggcaaaggtaatgaaacaaaagaagattcaaaagaagaacaaatcaaaaagagctttgcgaaaacgttagatatgtatccaatcaaaaatcttgaagatttatatgacaaagaaggatatcgagatggcgaatttaaaaaaggcgataagggtacatggactttactcacaagttttgctaaaagtaacaaaccaggcgagatagatgacgaaggtatggttttattccttaatagaaatacaaagaaggcaacaggatattattatatgaataaagctcatgatgaatttaatgaaaaagatcaacaaaaaaaatatcatgttgaacttaaaaataataaaatagttcttttggataatgtagaagatccaaatctcaaaaataaaatagagaattttaaattctttagtcagtatgctgattttagagatcttaaaaattataaaaatggaaatatatcaagtacagataatgtgccaagctacgatgcagaatataaaatgagtaatacggataaaaatgtaaaaaaacttagagaggtttatccgattacaaccaaaaagtcgccagtattaaaattacatatagatggcgacataaaaggaagttcagttggttataaaaatatagaatataatttttcaaaagtgaaagatcaagaaacagctgtaagagattttgtgaattttggaccatctgatggagatagctaaagtttattaagtgcagaaataattctaaaacagagagacgtgaaacgatggaatatttaaaaaggattggactgtacataagtatttttattttaatagctgttatagcaggttgtggcaaagataatgaaataaaagaagattcaaaagaaacacaaatcaaaaagagctttgcgaaaacgttagatatgtaccctattaagaatctcgaggatttatatgacaaagaaggatatcgtgatggtgagtttgaaaaaggcgataaggggacgtgggttatcagttcagcaatggttaaacagccaaaaggtaaaattatgagatcaagaggtatgtatctatttttaaatagaaatacaagaacggcaaaaggatattttattgtagatgtaacaagtaaggatacattaaaaaagacagaagataaagaaaagcgttatccagtaaagatggtaaataataaaataataccgattggtccaattaatgacgaaggcataaaaaaagaaattgaaaactttaagtttttctcacaatatggtgattttaaaggattaaagaattatcaaaatggtgattattcatataactcagaagcaccttcttattctgctaaatttcaattaagtaatgatgattataatgtaaaacaattacgtaaaatgtatgacattcaaaccaaaaaagctcctaaattgttgttgaaaggtactggagatttaaaaggttcatcaatcggacataaggacattgagtttaccttcgttgagaatcaagaagagaatgtattttttactgatagtttggagtttaccccaagtgaggactattaaatatgatgaaaaaaggggatacggacaatgaataattttaggcaatgcgcgttgtgtataggtacatcggtcttaattctattagtgtcaggttgcagtggcgtatttgacgctcctgaaggttcaaaagaaatacaaattaaaaagagctttgcgaaaacattagatatgtacccaatcaaaaatcttgaagatttatacgacaaagaaggatatcgtgatggcgagtttaaaaagggagacaaagggacgtgggttgttagatctgaaatgataattcaaccaaaaggtaaaagtttaacttcaagaggcatgacattatacatgaatagaaatactaggaccacaaccggttatttttcaatagaagagatagattcaagaaaaagtcttgatgaaagagaaacagaaaaaaagtatcctgtgaaaatgaaaaacaataagattattccaactgaggagataaaagatgaaaagttgaaaaaggaaattgaaaactttaagttttttgtgcaatatggcagttttaaaggaatagagaattatgaaaatggtgacatttcctacaattctgaagctcctatttattcggcgaaatataaactgaaaaatgatgattataatgttaaagaattacgaaaaagatataatattccaacagaaaaggcgcctaaattgttgttgaaaggttcgggggatttgaaagggtcttcagttggatataaggaaattgaatttatattcctagaaaataaaaaagaaaatatatatttttcagatggattaaacttaattccaagtgactaaaaataacacaaaggttgatagtgctcaacaaatattaacatgatagagagaagtgaaaaaatgaggaattcaaaaagagtagtattgtacataagcattatggtgttgagcatttttataattggttgcgatagatcaagcgatattacagaaaatcaaagagaagattcaaaggaagaacaaatcaaaaagagcttttcgaaaacgttagatatgtacccaatcaaaaaccttgaagatttatatgacaaagaaggatatagagatggtgagttttaaaaaggcgataaagggccgtggacgatatattcagactttgccaaaagtaataaaccgggtgagctaagtaatgaaggcatgttcttgagcttagatagaaacacacgtacagctaaggggtactactttgtcaggacattttatcgcaaggataagttaccttatagaaaaaattataaagttgaaatgaaaaataataaaatcattttattagataaagtagaagataaaaagcttaaacaaaaaatagaaaattttaaatttttcagtcaatatgcaaatcttaaagaattgaaaaactacagcaatggtgatgtctcaattaatgagaatgttccaagttatgacgtgaaatataaaatgagtaataaagatgaaaatgttaagcaattaagaagtcgttataatattcctactgataaatcaccggtattaaaaatgcatattgatggtaatttgaaaggaagttccgttggagataggaagttagaaattgatttttcgaaacgtgaaaatagccatttatcagtaatagattctttggattaccagccagcgaaaactaataaagatgatgaataatgaggatggtgtgtaacaatgaagtctataaaaaggattggattgtgcataagtctgttgattttaagcatttttgtaacatcttgcgatggtgataataagatcactggagattcaaaagaaacacaaatcaaaaagagctttgcgaaaacattagaaatgtatccaatcaaaaacctcgaagatttatacgacaaagaaggatatcgagacggagaatttaaaaaaggtgataaagggacttgggttattagatctgaaatgaaaatccaattaaaaggagaaaatctggaatttaggggagtagttttagaaattaacagaaatactagaacggctaaagggaattatattgttagagaagttgttgaagatagcgatggaatgacacacaatcatacaaaaatgtatcctgtaaaaatggaaaataataaaaatcattccattaaaacaaatcgttgatgaaaaagtaaaaaaagaaattgaagaatttaaattctttgtacaatacgggaatttcaaagaattggaaaactataaagacggagaagtgacatataacccagaagcaccaatatactctgcacaatatcaattgaaaaacagtgattacaatgtagaacaattacgtaagcgatataatatcccgacgcaaaaagcgcctaaattattattgaaagggtcaggtaatctaaaaggctcatcagttggatataaaaatattgaatttacctttgttgaaaataagggagaaaatatttacttcacagatagtgtctactttaatccaagcgaggataaatataattactaatataaaaaataacgttagaacatttaataataaagttaaatgaattacatgtattaaattgaataagtcagttttgtttgataacataaaagtgtaataatcactattttattaagttgtatgaaatattcaaatgtgtataaaaataaagcagagagatgtgaaatgatggagtatataaaaaaaattgctttgtacatgagtgtattacttttaatcatttttattgggggatgtggaaatatgaaagatgaacagaaaaaagaggaacaaacgaataaaacagattcaaaagaagaacaaatcaaaaagagttttgcgaaaacgttagatatgtatccaattaagaatctcgaggatctatatgacaaagaaggatatcgagatggtgagtttaaaaaaggtgataaaggtatgtggacgatatatacagattttgccaaaagtaataaagcagacgaattaagtaatgaaggtatggtcttatacttagatagaaatacacggacagcaaagggacattattttgttaagacattttatgaaaaggataaattcccagatagaaaaaaatataaagttgaaatgaaaaataataaaattatcttattagacaaggtagaagatccaaaactaaaaaagagaatagaaaactttaaatttttcggacaatatgcaaaccttaaagaattgaaaaattacaacaatggtgatgtctcaattaatgagaatgttccaagttatgacgcaaaatttaaaatgagcaataaagatgaaaatgttaagcaattaagaagtcgttataatattcctactgataaagcaccggtattaaaaatgcatattgatggtaatttgaaaggaagttctgtgggttataaaaagttggaaattgacttttcaaaaggtgaaaaaagcgatttgtcagtaatagattcattaaatttccagccggcgaaggtggatgaagatgaaagataaatacaaaatagatccaggacctattaaatataatactgaggaaactacagctatttctaaaataagttatgaaattgaaaatgcgaaattatatggaattaaaagtagaacaataggtagacaaatagatcaattaaaagaagcggaaaaattcccttctaatcttgaatatgttgatagttacactgattctcttactggagtaacaacttctgcttttttaaataaagatacaggcaaagtaactctcgggatgactgggactaatttacaagacgaagcctttaaaaagttaaaagaaggtgaattttcaagacaaaatgttaccaatgctttggaaacagttaaagatggatatgcagatcttaaaatattatattctcctgcatctgatcaaaactatagatatgcgaatacacaagaatttataaataaaataaaaagtaagtatgacattgattttattactggacattcactaggtggaagagatgcggtagttctaggaatgagtaatggtattccgaacattgtggtttataatccagctcctatttctataactagtttgaatcctaattccccagatggaaaacgattgttagagttatataaaaattataaaggtaatattactaggtttgttgcagaaaatgatgcattgacagaaaatctgaagaaatataagcattatgtttttttcggtaatgataaagtctttaaaaatggtaaaggtcatgaaatggaaggctttctgaccgaagaagaacaaaaagctataaaaaaagaacttaaaaaactacaaggttatgcagaagaaaataataagtcatttgtaaagaattcaaataatgctatctctaaattagctagtatagaattacttagagcaaatatgatgactacaaatggaggaggattatcttcttcgcagcaaaaagttttagaaagtttaacagctttaacaattgcgcagtcattcagtcaactgatagacgatgaaattaatcaaatcaaaaaaatgtataatgaaaagaaaaagaaatttggaaaaaattgggaagacgctcaaaaagctggaaaagctgtaggtgaagatttgagtgtaaatggagttctcaatgctttagatgaaggtcaagtgaatgaaagtagtatggtaagagaacctgaacaaatgatatctgcaaaagaaagacaactttcaacgatagggtcttctgtatcaaattatattatgagagttagactcagtattaatgaaatcgttgataaagatcaagtgcttgcatcacaaataggtggattactatgatgtttaatcaaattaataataaaaatgaattagaagaatcatatgaatctgagaaaaaacgtatagagaatgaactgcaaaatttaaatgaacttaggcatagaactcgaaaagaaaatgaacgtagttatgatgtttttcaatatttgaagcatgaaatgaattatagtgaagatgcccaaaggaaaatgacgagaaatatagaagcgtatgagcaagaaatcaatgagataattagaaagcaagaatggaaattagaagaatataaagaagacttaaaaaagtcttatgaaaagcagttagataaactaagtgactgataatttggaggagattaaatgactctaatagaaccagatatgaacttaagaatgccagatataagtactacagtagaaacacttaatctcatatctaaaatggaagcgcaaaaagaaaatattcgcacagttattgcacctgaacataagcataaatataaagatattgaaaatgggttaaaaggtgaagaaaaagtattaattgaacaaatggcgcagcattgcgaagcttttaaagctaattttaaaggcgcagctcaaggagattgggttaaaagtgctatgtctgagattgacagcattaaggatgacctgaaaaaaattaatagttaaactacatatcatattaataaataaagctcccttcaaaattttcattttttcaatgtctactttggagggagtacttcagtataatcacaactgacaccaggccgcttctttttaatttattccactttaaagtaacgctatcttaatggaaatatcacactcacaattgtaaaaacacaacttaaattactgtcccgcattaaacatatccacattccaaacagcaacaacaaaatcctcaagtaccaaaaacgatgaccgctttatcaaaatcaacgcaagttaacctctcccgaactccccgctatagatcatcatcaccttacaaaccataaagcgctgcagttaagtattgaatggcatagccaattgaaatgaaaatagcaatcgttataatagcactaccaatggtatataaagtatgtttcgtagataatccttcagtctttgaaccaaaaacacttagtagaataaatgcaataccaatgatatataaaactaaaatgacaaatagcatgtttatacacctcgattctctttcgtgagatatatctttgtctccattataaagtaaagcgctcaataatttaattaagtatactatttttttattatcgaagattgcgaaagacgaaatgctcctatataatgtaaaacggaattattcctatttgcaaatgaacgaaacaaataaattgaagtgagggtatatatatggctaaaattccagttacggtattaagtggttatttaggctcggggaagacaacgttgttaaatcatattttacaaaatcgagaaggtcgacgtatcgcggtaattgtaaatgatatgagtgaagtaaatatcgataaagatcttgtcgcagatggtgggggactatcgcgtacagatgaaaaattagtcgaactttctaatggttgtatctgttgtacacttagagacgatttattaaaagaagttgagcgtttagtgaaaaaaggtggcatcgatcaaattgttattgagtcaacagggatttcagagccagtacctgttgcacaaactttctcatatattgatgatgaacttggcattgatcttacagcgatttgccgtttagatacaatggttacagttgtggatgctaaccgcttcgtacatgacatcaactcagaagatttattgatggatcgtgatcaaagcgttgatgaaacagatgagcgttcgattgctgatttattaattgaccaagttgaattttgtgatgtattgattattaataaaattgatttaattagtgaagaagaactagcgaagttagaaaaaatgttaagcgcattgcaaccgactgctaaaattattaagacaacaaattctgaagtagatttaaaagaagtcttgaatacgcagcgttttgattttgaaaaagcgagcgagtcagcaggatggatcaaagaacttgagtctggtgggcatgcatcgcatacacctgaaacagaagaatatggtatatcatcgtttgtatataaacgtcgtctacctttccatgctaaaaggttcaatgattggttagaaagcatgccaaataatgtcgttcgatcaaaaggtatcgtatggctagcacaatacaatcacgtagcatgtttattatctcaagcagggtcatcttgcaatattcatccagttacatattgggtggctagtatgtctgaagcgcaacaaacgcaaatattagcagaacgccaagatgtcgcagctgaatgggatccagaatatggcgatcgtcatacacaatttgtcattattggtaccgacttagatgaaggtgcaattacaaaagaactcgatgcatgcttagtcaatgcgcaagaaattgatgcagattggcaacaatttgaagatccatatcaatggcaaattagaccggcacgataagttgaatgaagtgtaatcatttttaaattgtggcttaattgtttgcaatttatgacaattaataaaaagttaaggtgttcttaggatatttttgttttcaatctatctaaagtgtgatagttttgataaagcagaaatttgcattttatccatagggctaggacatatatgtgtcttagtcctttttatatttgcgttgattaaaaatgacaaaaccatcgtaccaactgttaattgaaagtacaatcattgtttaacggtcataaaaatgagtgaagtaattgcagctatcaatgtactattactgcttacagtcacacgagcgtttcagactaaacgtgcaacgaaattctgtacgcggccaatatatcttgcgctagatcaagaagatcattaagattttgcatgccaaatcatgaatgtctcagacctcgagtatcaaacataaaacacgtcacaaaaatataccgcgtcatactacaaaaatcacgaatatttcgtacgtcccaccaagaacatcctatacaaaaaacaccaagaccatttatttgcaacaaactacccagactcacctcacatcaataaatcaacacaaagcaaagccaccatccctattggtatagtggcctgagaattttaagtattcaattcgcttaaattattttgcgaaaatgtcgataattgctttgatgattttaatgatagtacctacaatagccatcgttttgtcctcctgtatgttgatttaacatagtgatgagttgttgattgttaatgtttgagattagttgttacctaaaaatttaccaagtaaatctttaaagaatttgaataattttgctacgaattccatgtgaatggcccccttcaaataagatgttcatatctatgagatttttataacttacttaccagtgaatttctcaattaatcctttaatgaatttaatgattcctgcaatgatacccatgtgaaagacctcctttgtttgttatgaaatcttatttaccagtgaattgttcgattaagcttttgataactttaatgatgccagcgatgatacccattaagattacctcctttgcttatgagttaacttcattgtacatagttatcttgtgcgtaattgatttttttcctaacttgaattgttatgatcataactgcgaattttttattttaaaaggacgggaaatactgcctaactgtacaggtgcatttacaaaatctttacaatcattggtttaatagaggttaagctcatgaatttgacatgaagcagaaatttaattatattttatgttataagtttaaaacgaataacacgttaggtctcgtctaggcaaagcatatttatgaagatgaattgaacagacagaagtaacattttatatacatatgtgcatgggagcacgcttaaagagaacaatgcaacaaggtatatcaacgtaccgtgatgcagtgtctagttaaactgaaacctgcaatagtaaattttctgccattatgtacagaatctactattgtaggtttttatttttatacataagcaattatgagagagattagaaataaggaggttatgcagtgttaagttttcaattgctattttcactgtttgttattgcgcttatcattgcattgataagtggcttgttgtttttagcaccagttatgccaatgagatatattaaattacatttatacatactagtcatgccagtattatttgcagtcattggctttttcggtattcatggtcaacatgtcttaggtccatttaaaatagatcgtttatcttggttattagctggctttgtaatggcgcttggctttattattcaaaagttttcaatgcgatatttactaggtgatcatcattatagacattactttccattgttcactgcgattacgtcgtttgcatctttagcatggatgtctgaagacttaagactgatggcactctgctggggtatgacattattatgtttaacattgctgatgaacgttaatcgtttttggaaagtgccacgtgagtctgcgaaattatcaagcatgacatttttatgtggttggcttgcattcgttggagcaattgtaactatttatattgcgactggcgagtggcgggtaccacaacatatagcgcatccgacatggtcattgttgacgaatgtactacttgtattagctgtcatgataccggcagcacaatttccatttcatcgatggttgattgaatctgtaacagcaccaacgccagtatcggcaattatgcatgcaggaattgtgaatgcaggtggtgttattctaactcgttttgcgccgatatttgataatggatttgcgttatcattattacttatcctttctagtatttctgtattgttaggatcgggtattagcttggttcaagttgactataaacgccaattagtgggctctacgatgagtcaaatgggctttatgttagttcaatgcgcattgggcgtatattcagcagcgattattcatttaatattgcacggtatttttaaagcaacattatttttacaatcaggttctatcgtgaagcgattcaatattccaaaacaagcatctgctaaagacgcttatggctggattgtcatgggacgtgtattagctattatcgtggcatttctgttttggatgagtagtgacagaagtgcatatgaagtgttaagtgcactcattctagcatggtcattacttgtatcttggaatcaaatggtagcctttagtaaagggcgtatggcacgtctggttggcatgattttgatttcaattgtgacatttatctacatcatcacacataattatttttacgatgtattacaaaatataacaacacatgcgacaacaccgcctacgattagtgtcatcattagtgttgtcatattaatatttggtagtttattaagtatctgggtagcgcgtcatcgatactctaagacttttgcggtattgtacgtgtggttagttaatctaggtgaagcacgctcgaaagcgatagaaagtcatccgaattatttgaagaagtatttataggaggtgaaaggtatgacaacacagttaaatatcaattcagtcattgaaaatgcgaaacgtgttattacaccattatcaccgatttcgatttttgcagcacgaaatccatgggaaggattagaagcggatacatttgaagatgtcgcaaaatggttacgtgatgttcgagatgtggatatttttccaaataaagcattaatagaaagtgctgtggcacgcggtgaattagacgaaagtgtctttaatcaacttgttactgatatgttacttgaacatcactacaatatcccgcaacactacatcaatctttatattgataacattaaaacattaaaagacgtacctgcatcatatatgaatcattcaaatgttgatgttgttgctgatctactattagaaaaatcaaaacgtgatatggctgattcatatcatcactatgatgtacgtccgatgagtgatgcaataatagatgaacaaggtgagccacttagcgaacaagtgaatcgtcaaatgattaaatggacgaaactttatatcgatcaatttctatcgagttggacaatgccgaagcgagagcaaagtttttaccatgcatggttgcatttagcgcaacatgaccatagttttactaaagcacagcgccaagtgattaaaggcttacccaatgatcctgaaatgacgatagagtcagtattaactcatttttcaatagatcaggaagactaccaagcttatgttgaaggacatcttttggcgttaccgggttgggcaggtatgttgtattaccgttcacaacagcatcactttgaacaatatttgttaacggattatttggcaattcggttagttgtcgaacaattgctagttggtgatgagtttaagtcagtcactaaagattgtgaaagtagatcggaaaattggtttaagcaaactgttgcatcatggtgttactacagtgatatgcctagcgatgtattactacaacatgacgtcaatgaaattcaaacgtttattcattttgcagcaactatgaataaaaatgtatttaaaaatttatggctaattgcctgggaaatgacatacgaatctcagttaaaacaaaaaattaaagcaggtcatgagagtgtggcgggcgcattagatgcaattcaagtaaatgtttcggaaaatgacaacgctaatcagtcacattcagtatcgttaaatgatacacaagcagttgatgaaaataatagcgagctaaatcaggtgtgcacatcaacgaaagcgcaaattgcattttgtatagatgttcgttcagaaccatttcgtagacatatcgaagcagcagggccctttgaaacgattggtattgcaggcttctttggattacctattcaaaaagatgccgtagacgaacaattcaaacatgattcattacctgtcatggtaccgccggcatatcgcattaaagagtttgcggaccgttacgatatgaatgtttatcgacaacagcaacagacaatgtcatcgatgttttacacatttaagttgatgaaaaataatgtcatgcctagtttgttattgcctgaattaagtggaccatttttaagcttgagtaccattgtcaatacgattatgcctagaaaaagtcgcgcgtctttacagaaaataaaacaaaaatggttgaagaagcctgaaacaaagttaacgattgatcgtgagtttgaccgaacatcagacttacctgttggatttactgagcaagagcaaattgatttcgcgttacaagcgttgaaattgatggatttaaccgaagcatttgcgccgttcgttgtgttagcaggtcatgctagtcattctcacaataatccacatcacgcatcacttgaatgtggggcttgtggtggtgcatcaagcggttttaatgctaagttattagcgatgatatgtaatcgtccaaatgtcagacaaggattaaaacaagcaggtgtagtaattccggagaccacggtctttgcggcagcagaacatcatacgtctactgatacgttggcatgggtatatgtgccagatacattatcttctattgctttagatgcatatgaatcattgaatgacgccatgccgatgatttctgaacacgcgaatcgcgaacgtttggacaaactgccaacgattggtcgtgtgaatcatccagtggaagaagcgcaacgtttcgcgagtgattggagtgaagtacgtccagaatggggcttggctaaaaatgcatcatttataattggaagacgccaattaacaaaaggcattgatttagaagggcggacatttttacacaattacgattggcgtaaagatgaagacggcacattgttaaataccatcatttctggtcctgcacttgtggcacaatggattaatttacaatattatgcgtcgacagttgcgccgcatttttacggcagtgggaataaagcgacacaaaccgtcacgtcaggtgttggtgtcatgcaaggtaatgcaagtgatctgatgtatggcttatcatggcaatctgttatggctgctgatcgaacgatgtatcattcgccaattcgtttgcttgtcgttgttcaggcacccgactatgttgtagctagactactcgcgaataatgagcatttcgctaggaaggtgtctaatcattggctgcgtttaatgagtgttaatgaggaagggcgttttaaaagttggatttaacgatgaaatgttgcgatgctaagtaactaatatatcatcatatctacaatgttctagcttcttaaaatatactaaaaatgataaacttaatgtaatagttgatgtcgtgataacgatacaaagataaagtaatcaattttaatattattggagttagtgatatgaaaagaacgaaaggtgaaatcgaagctgaaatcagtaaagccattacgcaatgggaaaaagatttccttggcagaggttccttgtcggttaaatcagacattttaagagatatggtgattattagtttacaaggtatcttaacgccagcagaatatcgtgtgtgtagtacgaatgaaggattattaaatattaaacgaacacgttctgaattagttgaatccggtgagcaagatttgaatgatatcatttttaaaattacaggtatcaaagtgatgagcttccatagtgatttaagtacagttacaggtgaacgtattatcgtattcaaacttgaggataatttggaaaagcatatttaagaaggttaggtatgcttctgctggcttattaaagctatagaagtatgcttggttaaacagcgcaacgccatatatttgggtgtgctgtttttctattatatgatgtgtttatcacctggaaggatgtgtgactctgaatatagcccgtgaaaggcatatgccataaaatttgcgaatggtggacgaggcaacgcaagcatatttgttgcgagacatgtcaacaatccttttacataaagagtgtatgtatgacgtatgcatataatcgataaaatatacctaaaaaattagggataatgaccattgttgcaataagtttttcggccttgaaaccgataacgcatagtataataggaataaaatataatacaaatatccagtaaatcaaatttgaaaacgatggatgtataggggtaaagaatctaactaatgtaatgattaacgctatatagacaaaaattactctattgatacgccctaccccctctgtataataaatatagatcgtactaaattgaaaatagcaaaatattgttatttcaattatacaatgttttatttgcaatatacataacaatatgaactttataattttgatattgtcggtaaagtgaaatttgtggcacattgatattatggataacatttgtaaaatgaaaatgatgatacgaggagattgtaagatgatagataaaaaattagcatcaccgaaaatgacagtgcctttatttttaattgcgctgattgtatttataggtatgttttacagtgtagtgacaaatcaagaatggcttaaaaatatagatatgggatcattaacatggtttacagattatttcggtgagccacaacgtcagtatgttaacaatttatttaattactatatgacgtttagtgcggaaattggagatgtcaaaggtgtcgtgttgatttccattatcgtcacaatcatactgtttattaaacagaggcatttagcggtttggtttgtgacatatttggtttcaggtgtcatcatgaacaaattaattaaagatactgttttacgtccaagaccatataatcatttagccgttgatacaggcttttcatttccgagtggacattctaacgccagcacattattatatttcgccttaatgatcattattatttcagttgctgctaagacaataacaaaagtgttgagtgcgctggttatgggaatgttatggcttagcatattattttgtcgcctttattttcatgcgcattacttttcagatgtcattggcggcacgtcactagcaatcatttgggtagcgttattcttaatggtatacccatactttattaatcatcgacgacaacgcgtttagcaaacatctttagacatagtggaggtatatagaaaaatgagaattaaaacaccgagtccatcttatttaaaaggcacaaatggacatgcgatattattattacattcatttacaggtacaaatcgggatgtgaagcatcttgcagctgagttaaatgcacaaggattcagttgttatgcaccgaattatccaggtcatggtttattgttgaaagatttcatgacatataatgtagatgattggtgggaagaagttgagaaagcttaccaatttttagtcaatgaaggttatgaatctatcagtgcaactggtgtgtctttaggtggattaatgacattgaaattggcgcaacactacccgttgaaacatatcgctgtcatgtcagcaccaaaggaaaagagtgacgatggcttaatagaacatttagtttattatagtcaacgcatgtcgaatattttaaatttagatcagcaagcatcgagtgcgcaattagcagcaattgatgattatgaaggtgaaattacgaagtttcaacattttattgatgatatcatgacaaatttaaatgttattaaaatgccagctaatatattatttggtggtaaagatgcaccatcctatgaaacaagtgcacactttatttatgaacatttaggatcagtagacaaagaattaaatggtctgaaggattcgcatcatttaatgacgcatggagaaggcagagatattttagaagaacatgttattcgctttttcaatgctttaacataattgaagattttaaaaattaacacttgagtgacgatgttattataattgtcatttgagtgttttttgtggcgtgatagtatagggaacttagacaaagttaatttgtagtgtgatgttgtggaaatattatgggcattgtacctgaagttgttatgtggcgagatgttggcgcacgtatacagcgttgaaccagaaattttaatgtagcgtaatgacaacacattacaaggtatttactatattatgataaactcaggagctaccgtattaatgaaacaattttgatgcaggtgtattgcatgttatttacatacatgttagagtgttacttaaacacgtagacgctttaacgctttaaaggagatgtgaatgatgaaaagacaacaatcacaatggaagtcatcaactggatttattttagctagtgcgggttctgcaatcggtcttggtgccatgtggaaattcccatatatggcagggatctatggcggcggtgcctttctagctatgttcttaatattcaccatttttgttggattaccattactcattatggaattcactgttgggaaaatgggacggacgtatacaacacaaatatatagtaaattaactggtaaaaaatggctcaatatcattggttggaatggtaatttggcagtgtttattttatttggcttctatagtgttatcggtggttggattgtcatttacatcggacaagtattatggcaattagttatatttcaacgcatcaatcatctccaagaaatgaattttgaagcggtaatatcaaatccttggttaaccgttctagggcaaggtatattcatattcgctacgatgattattgtcatgttaggtgttgaaaaaggattagaaaaggcatcgaaagttatgatgccattgctgtttgtctttttaatcatcattgtgattaagtctttaacattagatggtgccttagaaggtgtgaaatttattttacaaccaagagtatcagagattactgctgatggaatcttgtttgcgctaggtcaatcattctttacgttatcattaggaactacaggtatgattacttatgcgagttatgcctctaaagacatgacgattaagtcatcagctatttctatcgtggttatgaatatctttgtatctgtattggcaggcctagctatatttccggcgttacatagttttggctatgaaccacaagaagggcctggattattatttaaagtactaccaatggtctttagtcaaatgcatctaggcacattattctatttgggattcttagtgctgttcttatttgcggctttaacgtcatctatttctttattagaattaaatgtttctaacttcacgaagaatgacaatacaaaacgtaaaaaagtcgcagtgatcggtagtattttagtatttatcattagtattccagcaaccttatcttttggtatcttaaaagatgtgagattcggtgcgggaacgatttttgataatatggatttcatcgtttcgaatgtattgatgccattaggcgcattaggtactacgcttgtcgtaggacaattattagataaaaaattattacaacaatcttttggtaaagatagatttagattattcagtggttggtattacttaattaagtatgcgatgccggtcgttattattttagtctttatcgtgcaattatttagttaatatatagaagcatctgacacacaagtatttgtgttgctcaggtgtttttttgtttggaattgaaaagtttgtacttgttctgaattaatcgaaacttagataattgcaaaataacaaaatgtcgtttataattcttatctgaaaagtaaggattgaaattgagacatgaagaaaggtttcattcatttgatcggcatgtcagatgagggtgcatctatgattacttatgatttaattggtaatacaccattagtactgttagaacattatagtgatgaaaaagttaaaatttatgccaagcttgaacaatggaatcctggaggcagtgttaaagacaggctcgggaaatatttagtagagatggcaattcaagaagggcgtgtgcgtgcaggtcaaactattgttgaagcgactgctggcaatacaggcatagggttagctattgcagcgaatagacatcatttgaaatgtaagatctttgcgccgtatggtttttcagaagaaaagattaatattatgatagcgcttggtgcagatgtttcaagaacgagtcagtctgaaggtatgcatggggcacaattagctgcacgttcctatgctgaaaaatatggtgccgtttatatgaatcaatttgaatccgaacataatccggatacatattttcatacattgggacccgaattgacttcagcattacagcaaattgattattttgtggctggtattggctctggcggtacatttacaggtaccgcacgttatttaaagcaacatcacgtgcaatgttatgccgttgagccagaagggtctattttaaatggtggcgtagcccatgcacacgacactgaaggtatcggttctgagaaatggccgatatttttagagagaagtcttgtagatgggatatttacgattaaagatcaagatgcctttcgaaatgtcaaaagtttggcaaagcatgaaggattactggtaggcagttcttcaggtgcagcattacaaggtgcattgaatttaaaagcgcaattatctgaaggtacgattgttgtcgtatttccagatggtagtgatcgatatatgtctaaggaaatatttaattatgaggagaatgattatgaataagaaaacgaaattaattcacggtggacacacaacggacgactatacaggtgcagttacaacaccaatttatcaaacaagtacatatttacaagatgatattggtgatttacgtcaaggatatgaatattctcgtactgcgaatccaacaagaagttctgtagaaagcgttattgcgacattagaaaatggcaaacatggctttgcatttagttcaggtgttgcagcaatcagtgcagttgttatgttgttggacaaaggagatcatattattttaaattcagatgtatacggcggtacttatcgcgcattgacaaaagtatttacacgatttggcattgaagtggattttgtagatacaacgcatacagattcaattgtacaagcgatacgcccaacaacaaagatgttgtttattgaaacaccttctaatccattattacgtgttactgacattaaaaagtctgctgaaattgcgaaagaacacggtttgatttcagtcgttgataacacatttatgacaccttattatcagaatccattagatttaggcatcgatattgtcttacattctgcaacgaaatatttaggtggacatagtgatgtcgttgctggtttagttgcaacatcggatgacaagcttgcagaacgtttagcatttatttcaaattcaacaggtggcattttaggacctcaagatagctatttacttgtaagaggtattaaaacattaggtttacgtatggaacaaattaatcgcagtgttattgaaattattaaaatgttacaagaacatccagctgtgcaacaagtgtttcatccaagtattgaaagtcatttaaatcatgatgtccatatggctcaagcggatggacatacaggtgtgattgcatttgaagtgaaagatacagaaagtgccaaacaattgattaaagcaacatcgtattacacattagctgaaagtttaggtgcagtggaaagtttaatttcagtacctgcattgatgacacatgcatccattccagcagatattcgagctaaagaaggtattacagacggacttgtaagaatttctgtaggtattgaagatactgaagatttagtagatgatttaaaacaagcactagatacgttataaataatagtagcactggcatatattttgagttcaacatttgttgttcttgaatatgctagtgcttttttagtgcgatgttaatatttcgtgattgagttgtggagatttttatggatttaatttgacgatagtcatagtcttgtcacaaggtattattttttaattttttagaaaattcggcaaattgtattgacgatatatgcaattttacatataatgctcttattcctagtggattaataagaatttgtaggaggggcgatgatgattgagtttcgacaagttagtaaatcatttcataagaaaaagcaaacaatagatgctctgaaggacgtatcatttacggtcaatcgcaatgatatttttggtgtgattggatatagtggtgcaggaaaaagtacgttggtaaggctcgtaaatcatcttgaagctgcctcgaatggacaagtgattgtagatggacatgatattacgaattatagcgataaaatgatgcgggatattaagaaagatatcggtatgatatttcagcattttaatttactaaattcagctacggtatttaaaaatgtagctatgccgctcattttaagtaagaaaagcaaaacagaaattcagcaacgcgtaacggaaatgcttgaatttgtaggattgagtgataaaaaagaccaatttcctgatgaattgtcgggtggacagaagcaaagagtggctattgcaagagcgcttgttactaatccgaaaatactcctatgcgatgaagcaacaagtgcattggatccagcaacgactgcttcgatattgacgttattaaagaatgtcaatcaaacctttggcattacaattatgttgattacacatgaaatgcgcgttattaaagacatttgtaatcgtgttgctgtaatggaaaaggggcaagtggttgaaacaggaactgttaaagaggtgtttagtcatcctaaaacgacgattgctcaaaattttgtgtctacagttatacagactgagccaagtacatcattgattcgtcgattgaatgacgaacaagttggcgattttaaagattataaaatcttcgtcgaggaaactcaggtgacacaaccgattataaatgacttgattcaaatttgtggcagagaggttaaaattttattttcatctatgtcagaaatacaaggtaacaccgtatgttatatgtggcttcgatttaatatggatcaacaatttgatgacaaggcaataaatcaatatttcaaagagaaaaatattcaatttgaggaggtgcattaacatatgtttggttctgatttagacagtgcacagttattacaagcattatacgaaacgctatatatggtatctattgctttatttttaggagcagtgattggtattccattaggtgtcttattggtaattactcgaaaacaaggcatatggcccaatatagtgatacatcaagttttaaatcctttaatcaatattttaaggtcactaccatttattattttgttaattgcgattgtgccattcacaaaattagtagtaggtacttccattggtaccactgctgccatcgtgcctttaacagtatatgtagcaccttacattgcaagacttgttgaaaactcattattggaagtagacgaggggattattgaagcggcgaaagcgatgggcgcttcaccactacaaatcattagatattttttaattcctgaagcgttaggttcattagtattagcaattaccactgcgattattggacttattggtagtacggcgatggcaggcgctgttggcggtggtggtataggagacttagctttagtgtatggttatcaaagatttgatacgacggtcattattattaccgttattgtattagtcgttattgtccaagtgattcaaacgctagggaatatcctagctagattcatacgtagacattaatgatatatagtgaagattttgaaaggaattgatagaatgaaaagattgattgggttagttatcgtagcacttgtattattagcagcgtgtggtggtaacaatgataaaaaagtaacgattggtgtcgcgtcaaatgacactaaggcttgggagaaggttaaagaattagctaaaaaagatgatattgatgtggagattaagcacttctccgattacaatttaccgaataaagcattaaacgatggtgatattgatatgaatgcattccaacattttgcatttttagatcaatataaaaaggcgcataaaggaacaaatatttcagcattaagtacaacagttttagcaccgttgggtatttactcagataaaattaaagatgtcaaaaaggttaaagatggtgctaaagttgtcattccaaatgatgtatcaaaccaagcacgtgcacttaaactattagaagcagctggtttaataaaactgaaaaaagatttcggtttggcaggcacggtgaaagatataacgtctaatccaaaacatttaaaaattactgcagtagatgcacaacaaactgcacgtgctttatctgatgtcgatattgcagttattaataacggtgtagcaactaaagctgggaaagatccaaaaaatgatccgattttcttggaaaaatcagattcagatgctgtaaagccatatattaatattgttgcagttaacgacaaagacttggataacaaaacatatgctaaaatcgtagaattgtatcattcaaaagaagctcaaaaagcgttgcaagaagatgtcaaagatggagagaaacctgttaatttatctaaagatgagattaaagcaatagaaacgtcattagcaaaataaattatattgcgtcctacaagcaaagttcatgcttatgtttgtagggcgttattgtttgacaacaaaattatttcaaaagacagaaagggattgtaatcattttatagttaaatattatgaaattgtaataatttagatattgtaaaatctaataagttgtaataattttaagaggtaattataaaatttgatgacacagtatatgatttttttgtaatcataatgtcatcaaacatcaacctattatacataattaaatcgtataatgatgtagtattcataaattcggataaaagaatgttaggaaagttatgcaagaggaggattttaaagtgcaaaaaaaagtaattgcagctattattgggacaagcgcgattagcgctgttgcggcaactcaagcaaatgcggctacaactcacacagtaaaaccgggtgaatcagtgtgggcaatttcaaataagtatgggatttcgattgctaaattaaagtcattaaacaatttaacatcaaatctaattttccctaatcaagtattaaaagtatctggctcaagtaattccacgagcaatagtagccgtccatcaacaaattcaggtggcggatcatactacacagtacaagcaggcgactcattatcattaatcgcatctaaatatggtacaacttaccaaaacattatgcgacttaatggtttaaataatttctttatttatccaggtcaaaaattaaaagtatcaggtactgcaagctcaagtaattctgcgagcaatagtagccgtccatcaacgaattcaagcggtggatcatactacacagtacaagcaggtgactcattgtcattaatcgcttcaaaatatggtacaacatatcaaaacattatgagacttaatggcttaaataatttctttatttatccgggtcaaaaattgaaagtaactggtaatgcatctacgaactcaggatctactacaacgacaaatagaggttacaatacaccagtattcaatcaccaaaacttatatacatggggtcaatgtacatatcatgtatttaatcgtcgtgctgaaattggtaaaggtattagcacttattggtggaatgcaaataactgggataacgcagcggctgcagatggttacacaattgacaatagacctactgtaggttcaatcgctcaaacagatgtaggctactatggacatgttatgtttgtagaacgcgtaaataacgatggtagtattttagtttcagaaatgaactattcagctgcaccaggtattttaacttacagaacggtaccagcttaccaagtaaataattatagatatattcactaaagtcttacgtatataaatatatataatgaattcctattacatttcacaagctgaaaagttggattgaatcctaaactttatggcgtgactatcaaagtcgtgattattgtaataggaatttttgtataagaaaaaggattgatcgaatgaacgtcatgttctatgttcgaccaatccttttctgatttagtattcatgctttactttgcgaatgcttgtaaataatctagcaccgtttgttattaaagtaacaactgccactgcttttttgaacttgcgtggtgacttaattgaaatgtaaaagtctaacacggttcctacagtgcttaaacctaatgaaagatatactaattttttatttttagcatgatatttatagccattgtagccgtcgactatgaaacctgcgacatttagtaaacttgataaacgttgtgatttggaacgttttgccataataataattccccctagtatcttctgtttatatggaataattgggtgcgctgaattgctaacgttttgcgctataactactcatatatgataacataattgtacagtataatttgaaaaattgatttcacaaagtgggggtgtcaaagatgattaaatgtgtctgtttagtagaagaaacagctgataaaatattgcttgttcaagtaaggaatcgcgaaaagtattatttcccaggtggtaaaatagaagaaggagaatcacaagtacacgcgctgttaagagaagtaaaagaagaaataaatttaacattaacaatggatgaaattgaatatatcgggacaattgtaggtcctgcatatccacaacaggatatgttaactgagttaaatggatttcgctcattaaccaaaatcgattgggaaaatgtaactatcaataatgaaattacggatatacgctggattgataaagataatgatgcgttgattgcgcctgctgtcaaagtttggattgaaacgtatggtggtaaacatgacaaataatgacaccatcatgttacgacattatgtcccacaagattattcgatgttagaagcttttcaattaagtgaaagtgatttgaagtttgttaaaacgccagaggaaaatattacagctgcaatgtctgataatgaaaggtatcccatcgttgtaatggatggcaggcaatgtgtggccttttttacattacatcgtggaaaaggagtcgcaccatttagcgataaccaggatgcagtatttttcaggtcatttagtgttgatcaacgatatcgtaataaaggaataggtaaagtagtaatggaaaaattggcgccatttatcatttcaacatttcaggatattaatgagattgtgttaacggttaatactgacaatccacatgccatggcactttatcgccaacaaggatatcaatatatgggagatagtatgttcgtcggaagacctgttcatattatggcgctaactataaaataaataaatttaaaagcatctttactcatcgtcgaccacaaaaattaatgatgaataaaggtgcttttgttatagatcatcggacaatttactatagtaaaaagcgacctggtgaacaattgacatatatccacaggtcgcttaacttaagttatattgctagttgcgattaattgatagactcatcatttttgcgctgtcgagatggtctttttattaaaaatgccgtaatccaagccgtaatcggaatactgattgcaacggcaataccgcctaaaataatagaaataaattcttgggcaaatattttcgagtttataatatgaccaaatgaatatttaagtttgaaaaaccaaataaataaagcaagttggccaccaaaaaaggcaaggtaaatcgtgttcgcagatgtcgctaaaatttctctaccaacacgcatgccagattggaataattcgtattgcgtaagtgttggattcacttgatgcaattcataaatgggtgaactaatggtaatcgttaagtctatcacagctgcaataacagcaagaataatagtgaacaccataaattgaaccatatcaatgccaatattcattgagtacacatatgtttcatcttgttgttcggttgaaaagccttgtagatgaccgaagtagaccgataaataaatgagtgtaatcaacaaaattgttgtaacgatagtgctgataaatgcagcttgtgttttaacattgtaactattgagtacgaataaattacaagcgccaataataatgcagaaaaagaatgtgacgacataaatcggtacgccaaaaataatcaatacaatactaataattaaaatggcaaagtttaaaaataaagttaaataagagatgaatccctttttacctccgaaaattatcatcagaaagaggagcaataacgccaatataaatacagcattcattgtttcgccctccttaatgtttcaaatatttccataaacaatattgtgataggaattgtaagtacgatacctataccacctgttagtgcgcgcgcaatttctaacgaccaattcatcgaaatcgtataagtcactgtattggcattttttaaaaagattaaaaacataggtagtgcaccggataaatatgagaataataagatgttagtcattgttcccataatatcttggcctatgtttcgcccggcaagtgcccatctcctcattgaaatgtgcggcgtacgttgtaaaatctcatgcatgccacttgcaatcgtaattgcaacatccataatagcgccaagtgaacctattaacactgaggctaggaagatatctttcggtggtaatgataaaaaattcatcgtttcatatttaatacctttaccatctgtcatatatatgattaattctgttaaacctatactcaaaaaagttccaataattgtactggcaactgtaatgagcgtacgcatatgccagcctgtaacgagcaataaagtgagtattgttgaacagatcatggcaatggtcatgagtaagaataaattaatattactatgttgaatatgaatgtaaattgcgattaatatggcaatagaattcaagattaacgataaaatcgattgcagtccgactttgcgaccaaccaataatacagttaataagaacaaaccagtgatgataaccgttaaggtatcacgcttcttttctataatataagcatcactcggcttgttagaaatatgtaataatactttttcgtgtgtgcgaaatgcttctgaatctgcttgagatttgacgtactgatgattaatcgtcgtcgtttctccagcaaattgaccatttaatattttgacttttaattgatttttatacttagtatcgcggttattttgtgcatcttttgtaggtgtcgatgaaacgtgtttgacatctataatttgaccaattggtttgttgtaaaagttctcattattgaatgtaaataaaatagcaccaatgaatgcgatgcagaacaaacctaaaattatattaaatggctttgtaaataaatttctatatttcaaaaacaaaaccccaattctatgaatgaattaatatggtgattatacgcccttaattttttattttcaaagatattactgctaagtgtaaaacgaaaatcatcattgatagcgtcgaattacttaatggaatgtagacgttttagtcattaattgctgaatgagtgttaataagataccaatatcactcttcgtataaggttctttcgtaatagcacatatcgttctttttaattcagtatgatctaattttatatctatccatgatttagattctggtaaatgtatattttgtgatgaaatgatgtaaccttctttttgacgaaggagatactgcgcaagtggtaggctactgattgtgtatacatctgatttagtaatcttacgcaattgcttttttacagattcggcaaatggtgccaagcaataaatatgactatgctcaaactgaattaatggtgggtgtgtcgccatcgtaattggatcgtctgaaggcgcatataaatgatagtgctcttcgaataaaggtagcatatgtaattgtttgtgtttacgtatttctggagtaagttccgtgaaaccaatgtctatattcccatttaatacgctatttataatcgtgtcatgttctaataaattagggatgacatgtgtatcattttgcaaatgaaatgtttggataagtggtagtaacatgtgggatacgtcactctcatcatagccaatgtagatacttttatttttagttaatccatggctttgaaattgttcaatcgtgctatctaaatgttcaataatacgcagagcttcattaaataataatttcccttcagatgtgagcataatattgcgtccttgttttttaaataaagacacattaagttcttgttctaataatgtaatttgacggcttatcgctgattgcgcaatgtttagttcaagtgctgtttcggagatatgttctcttttagcgacctcgataaaatatcttaattgtttaatttccatagcgatataagcacctccgaaaatgagtgttttgtaactattatagcaatattattggtaaatgttctattttttagatgaatatcttctattttatatattgaacagataaattttttagattatagtaattatcattaataactaatatcagaatattctaaaaaaggggtgtgcatcatgcacaatgagaaattaattaaaggcttatatgactatcgtgaggaacatgatgcgtgtggtattggtttttatgcgaatatggataataaaaggtctcacgacatcattgataaatcgcttgaaatgttgcgacgcttagatcacaggggcggggtcggcgcagatggcatcactggtgatggcgcaggtattatgactgaaataccttttgcatttttcaaacaacatgtaacggactttgatatcccaggtgaaggtgaatatgccgtgggattatttttttccaaagaacgcgttttaggttctgaacatgaagcagtttttaaaaaatattttgaaggcgaagggttatcaattcttggttatcgtaatgtaccagttaataaagatgccattgctaaacatgtagcagatacgatgccagtcattcaacaagtgtttattgatattagggacattgaagatgttgaaaagcgtttgtttttagcgagaaaacaattagagttctattcgactcagtgcgatttagaattatattttacgagcttatcacgcaaaacaattgtatataaaggttggttacgatcagaccaaattaaaaaactctatacagatttatcggatgatttatatcaatcaaagctagggttagtgcattcgagatttagtacgaatacattcccgagttggaaaagggcgcatcctaaccgtatgttaatgcataatggtgagattaacacgattaaaggtaatgtgaactggatgcgagcgcgtcaacataaattaatcgaaacattatttggcgaggatcaacataaagtgtttcaaattgtcgatgaggatggtagtgactctgccattgtagataatgcgctagagttcttatcgttagccatggagccagaaaaggcagcgatgttactcatacctgaaccttggttatacaatgaagcgaatgatgcaaatgtacgtgcgttttatgaattttatagttatttaatggaaccgtgggatggtcctacaatgatttcgttctgtaacggtgacaaacttggcgcgcttacagatagaaatggattacgtccaggtcgttatacgattactaaagataactttattgtcttttcatctgaagtgggtgttgtggacgtacctgaaagtaatgttgcttttaaaggacaattgaatcctggaaagttattgcttgttgattttaaacagaataaagtcattgaaaataatgatttaaaaggtgcgattgctggagaattaccatataaagcgtggattgataaccataaagttgactttgattttgaaaatatacaatatcaagattcgcaatggaaagatgagacgttatttaaattacaacgtcagtttgcatacacgaaagaagagattcataagtatattcaggaacttgtagaaggtaagaaggatcctatcggtgcaatgggatatgatgcgccaattgcagtgttgaacgagcgaccagaatcactatttaattactttaaacagctgtttgcacaagttacgaatccaccaattgatgcgtatcgtgaaaaaatcgtaacgagtgaactttcttatttaggtggcgaaggtaacttactagcacctgacgaaacggttttaaatcgtattcaattgaaaaggccggtattgaatgaatcacacttagcagcgattaatcaggaacattttaaattaacttatttatcaacggtatatgaaggggatttggaagatgcgttagaagcattaggccgagaagcagtcgatgctgtaaagcaaggcgctcaaattctagtgttagatgatagtggattagttgatggcaatggctttgcaatgccgatgttactcgcaataagtcatgtgcatcaattacttattaaagcagatttacgtatgtctacaagtttagtcgctaaatctggtgagacacgagaagtgcatcatgttgcttgtttactagcatatggcgcgaatgcaattgtgccatacctagcgcaacgtacagttgaacaactgacattgacagaagggttacaaggcaccgttgtcgataatgttaagacatatacggatgtattgtcggaaggtgtcattaaagtaatggctaagatgggaatttcgacagtgcaaagttatcaaggtgcacaaatatttgaagcgattggcttgtctcatgatgtgattgatcgttattttactggaacacagtctaagttatctggtatttcgattgatcaaattgatgctgaaaataaagcacgtcaacaaagtgatgataattatcttgcatcaggtagtacattccaatggagacaacaaggtcaacatcatgcttttaatccggaatctattttcttattgcagcacgcatgtaaagaaaatgactatgcgcaatttaaagcatactctgaagcggtaaacaaaaatagaacagatcacattagacatttacttgaatttaaagcatgtacaccgattgacatcgaccaagttgaaccggtaagtgacattgtcaaacgctttaatacaggggcgatgagttatggatcgatttcagcggaagcacatgaaacgttagcacaagccatgaaccaattaggtggaaagagtaatagtggtgaaggtggcgaagatgcaaaacgttatgaagtacaagttgatggaagcaacaaagtaagtgcgattaaacaagttgcttctggacgttttggtgtaactagtgattatttacaacatgccaaagaaattcaaattaaagttgcgcaaggtgcaaagcctggtgaaggtggtcaattacctggtactaaggtatatccgtggattgcgaagacaagagggtcaacgccaggtatcggtctgatttcatcaccgccacatcatgatatttattcaatagaagatttagcgcaactgatacatgatttgaaaaatgcgaataaagatgcagatatcgcggtaaaattagtttcgaaaacaggtgttggtaccattgcatctggggtggcaaaagcatttgcagataaaattgtcatcagtggttacgatggtggtacaggggcttcacctaaaacgagtattcagcatgccggtgttccttgggagattggtttagcagaaacacatcaaacattaaaactaaatgacttaagaagtcgtgttaagttagaaacagacggtaagttattaactggtaaagatgtagcgtacgcatgtgcgcttggagcggaagaatttggatttgcaactgcaccattagtggtgttgggctgtattatgatgcgtgtatgccataaagatacatgtccagtaggagttgcaactcaaaacaaagatttacgtgctttatatagaggtaaagcacatcatgttgttaattttatgcattttattgcacaagaattaagagaaattttagcatctttaggtttgaaacgtgtagaagacttagttggaagaactgatttgttacaacgatcatcaactttaaaagcgaatagcaaagcggctagtattgatgttgaaaaactgttatgtcctttcgatgggccaaacacaaaagaaattcaacaaaatcataatcttgagcatggatttgatttaacaaatttatatgaagtaacgaagccatatattgctgaaggacgtcgctatacaggtagctttacagtaaataatgaacaacgtgatgtaggggttattacaggtagtgagatttcgaaacaatatggagaagtaggacttcctgaaaatacaattaatgtttatacgaatggtcatgctggtcaaagtcttgcagcatatgcaccgaaaggtttaatgattcatcatactggagatgcgaatgactatgttggtaaaggattatctggtggtacggttattgtcaaagcaccttttgaagaacgacaaaatgaaattattgctggtaacgtctcattctatggtgcgacaggtggtaaggcatttattaacggtagtgcaggagaaagattctgtattagaaatagtggtgtagatgttgttgttgaaggtatcggcgaccatggattagagtacatgactggtggacatgtcattaatttaggtgatgtaggtaagaacttcggtcaaggtatgagtggtggtattgcttacgttattccgtctgatgtagaagcttttgttgaaaataatcaactagatacgctttcgtttacaaagattaaacatcaagaagaaaaagcattcattaagcaaatgctggaagaacatgtgtcacatacgaatagtacgagagcgattcatgtgttaaaacattttgatcgcattgaagatgtcgttgttaaagttattcctaaagattatcaattgatgatgcaaaaaattcatttgcacaaatcattacatgacaatgaagatgaagcgatgttagctgcattttacgatgacagtaaaacaatcgacgctaaacataaaccagccgttgtgtattaaggaaagggggagatacgatgggtgaatttaaaggatttatgaagtatgacaaacagtacttaggtgaattatcactggtagaccgtttgaagcatcataaagcatatcaacaacgatttactaaagaagatgcctctatccaaggtgcgcgatgtatggattgtggaacgccgttttgtcaaaccggacaacagtatggtagggaaacaataggttgtccaattggaaactacattcctgaatggaacgacttagtgtatcatcaagattttaaaactgcttatgaacgcttaagcgaaacaaataactttcctgactttacagggcgtgtatgtcctgcaccatgcgaaagtgcttgtgtgatgaagattaatagagaatcgattgcgattaaaggtattgaacgcacaattattgatgaagcttttgaaaatggttgggtagcgccgaaagttccgagtcgccgtagagatgaaaaagtagcaatcgttggaagcggtccagcaggattaactgctgctgaagaacttaatctactaggatatcaagtaactatttatgaacgtgctagagaatcaggcggtttattaatgtatggtattccgaatatgaaacttgataaagatgtggttcgacgtcgtattaagttaatggaagaagcgggcattactttcattaatggtgttgaagtaggcgttgatattgataaagcaacgttagaatctgagtatgatgcaattatattatgtactggtgcacaaaaaggtagagatttacctttagaaggacgcatgggtgatggtatacatttcgctatggattatttaactgaacaaacgcaactgttaaatggagaaatcgatgatataacaataactgcaaaagataagaatgtcattatcattggtgctggtgatactggggcagactgtgtagcgacagcattaagagaaaattgtaagtcgattgttcaatttaataaatatacgaaattgccagaagcaattacgtttacagaaaatgcatcatggcctttagcaatgccggtgtttaaaatggactatgcgcaccaagagtacgaagctaagtttggtaaggaaccacgtgcatatggtgttcaaacaatgcgttacgatgttgacgataaaggacacatacgtggtttgtatactcaaattttagagcaaggcgaaaatggtatggtcatgaaagaaggacctgaaagattttggcctgctgaccttgtattattatcaatcggcttcgaaggtacagaaccaacagtaccgaatgcttttaacattaaaacggatagaaatcgaatcgtggcggatgatacaaactatcaaactaataatgaaaaagtatttgctgctggagatgctagacgtggtcaaagtttagttgtatgggcgattaaagaaggaagaggcgtagcgaaagcagtagatcagtatttagcgagtaaagtttgtgtataatctttgtatggaaacggtggttacgttgacgttgaatggtgctgaatcgagtttgaaataatctagtatctatcaacgtcacatgccatctttgtaacctaaaaataaaggtttgtaagacaactaatatattaattataagtagtggtattttacattcgttttataggtcaactgtagtggaagacaatgatttgtggtaatcatgtaatgcttaaaaacaatattgacttttacagaacgttcatatatgataaatattgtgtttaggaggaatacccaagtccggctgaagggatcggtcttgaaaaccgacaggggcttaacggctcgcgggggttcgaatccctcttcctccgccattaatatttatattaaatactatatataaaaaaggtaagtactcaaagtttgagtgtttaccttttttatttgcctttgaatgactcgtattttttgataatagaaatgataaggcattgagattggaagggcatttggcttgtgcaatatacatagctaaatgtcttttttgttttatgaaatatgatggatggcttgtgtgggcaagtttactatttatagatatgcatttttcaatttaggagttggccccatgcatctacactttgtaatggcgagagcgtggtgagaaattgttaatagcgcaattgtagtgaggagttattgctatatatgtcgttatggctcattgattttctgaaatggctacaccagataatgtgacaaaataaaaatattttgttgaaagcctttacataacttgtctagacaagttatactcgttttaagacattaagggagtgaaatatatggctgtaaaaagagaagatgtaaaagccatcgtaaccgctattgggggaaaagaaaatcttgaagctgcaacgcattgtgtaacacgattacgtttagtgctgaaggatgaaagtaaagttgataaagacgcattaagtaataacgcgttggtcaaggggcagttcaaagcagaccatcaatatcaaattgtcattggtccaggaacagtcgatgaagtgtataagcagtttattgatgaaacaggtgctcaagaagcttctaaagatgaagcgaaaaaagcagctgcgcaaaaagggaatccagtacaacgtttgatcaaattgttgggggatatttttataccaatattacctgcgattgtgacagctggtttgttaatggggattaataatttacttacaatgaaaggtttatttggtccaaaagcacttattgagatgtatccacaaattgctgatatttcaaacatcattaatgtgattgcgagtacggcatttattttcttaccagcattaattggttggagtagtatgcgtgtatttggtggtagtccgattctaggcttagtcttaggtttgattttaatgcacccgcaattagtatctcagtatgatttggcaaaagggaatattccgacgtggaatttatttggcttagagattaagcagttgaattaccaaggtcaagtgttgcctgttttaattgcagcttatgttctagctaaaattgaaaaaggattaaataaagtcgttcacgattcgataaaaatgttggtcgttggacccgtagcgcttttagttactggatttttagcatttattatcattggaccagttgcattattgattggtacaggtattacatctggtgttacatttatattccaacatgcaggatggcttggcggagcaatatatggattgttatatgcaccacttgtaattacaggactacaccatatgtttttagcagtagatttccaattgatgggtagcagcttaggtggtacgtacttatggccaatcgttgcgatttcaaatatttgtcaggggtctgcagcatttggagcatggtttgtctataaacgtcgtaaaatggttaaagaagaaggcttggcattaacatctggtatttctggtatgttaggtgttactgaaccagccatgtttggtgtgaacttacctctgaaatatccatttatcgctgcgatatcaacgtcttgtgtattgggggcaatcgttggtatgaataacgtacttggaaaagttggtgttggtggcgtgccagcattcatttcaattcaaaaagaattttggccagtatatcttattgtgacagctattgctattgttgtaccatgtatactaacaattgtgatgtctcattttagtaaacaaaaagcgaaagaaattgttgaagattaataaaataaaaaaggggcgttcgttatttggacgtcctttattacgttataaggtggtaattgtgtgtcgaaagaaatagattggagaaaatccgttgtatatcaaatttatcctaagtcgtttaatgatacgacggggaatggtataggagatattaacggaattatagaaaaattggattatatcaagttattgggtgttgattatatttggttaacaccagtgtatgaatcaccgatgaatgataatggctatgatatcagcgattatttagaaatcaatgaagactttggaacgatggatgattttgaaaagttaatcaaaggtgctcatcaaaaagacttgaaagtgatgttagatattgtcattaatcatacgtctacggagcatgaatggtttaaagaagcccgtaaatctaaagacaacccatatagagattattactttttcagatcatctgaagacggaccgccaacaaattggcattctaaatttggtggtaatgcatggaagtatgattctgagacagatgaatattatttacatttatttgatgtcagtcaagctgatttaaattgggataatccggaagtacgtcaatcgttatatcgcattgtcaatcattggatagacttcggcgttgatggttttcgatttgatgtcattaacttaatttctaaaggtgaatttaaggactctgacaaaataggtaaagaattttatacggatggtcctagagtgcatgagtttctgcatgaattaaatcgtcaaacgtatggtaacactgacatgatgactgtaggagaaatgtcttcgacgacgattgaaaattgtattaagtatacacagccagaacgccaagaattgaatagtgtttttaattttcatcatctaaaggttgattatgttgatggtgaaaagtggacaaatgcgaagcttgattttcataagttaaaggaaattctgatgcaatggcaacgaggtatttatgacggtggcggatggaacgcgattttctggtgtaatcatgatcagccacgggtagtgtctagatttggtgatgatacgtcggaagagatgaggatacaaagtgctaaaatgttagctatcgcactgcatatgttgcaaggtacgccatatatttaccaaggtgaagaaattggtatgacggacccacattttacatcaatagcacaatatcgtgatgttgaatcgattaatgcctaccatcagttgttaagtgaagggcatgctgaagcggatgtgttagcgattttaggacagaagtcacgagacaattcgagaacgcctatgcaatggagtgatgatgttaatgctggatttacagctggtaagccttggattgatattccagaaaattatcatcaggtcaacgttagacaagcactaaaggataaagattctattttctacacgtatcaaaaattaatacaattaagacatacgcatgatattattacgtatggagacattgtgccacgttttatggatcatgatcatttatttgtttatgaacgtcattataagaatcaacaatggctagtaattgcgaatttctcagcatcggctgttgatttgccagaaggattggctagcgaaggtcgtgttgtgattcaaacaggcacagtggaaaataatacgataagcgggtttggtgcaattgtaatcgaaacaaacgcgtaaaataaattgagtggatgcgtttatatggcgaaacaaaaaaagtttatgaagatttatgaggcgttgaaagaagatatattaaacgggcagattcaatatggtgaacaaattccgtctgaacatgatttggtgcaattgtaccagtcatctcgagagaccgtgcgtaaggcattagatttgttggcattagacggtatgattcaaaagattcatggtaaagggtcgcttgtcatttatcaggaggttacagagtttccattttctgaacttgttagttttaaagaaatgcaagaagaaatgggtgtcgcatatttaactgaagttgttgtgaatgaggttgttgaagcgcatgaagttccagaagttcaagatgctttaaacatcaattctagtgaatcgctcattcatattgttagaactcgtcggcttaaccaacatgtgaagattgttgatgaagattattttctaaagtcgattgtttcagacatagggaatgatgttgcgagtgattctatttatgattatttggaaaaggtattaaatcttaatattagttattcaagtaagtctattacttttgaaccgtttgatgaacaagcatatcaattgtttggtgatgtatcgttggcttattcagcaacagttcgaagtattgtgtatttagaaaatacaatgccgtttcaatataatatttcaaaacatcttgcaaatgaatttaaatttaacgacttctcaagacgtcgtataaagtaaacaatgatataaatgatttatacttgcaattaactattaaaatatagtaatatatatcttgccgtgctaggtggggaggtagcggttccctgtactcgaaatccgctttatgcgaggcttaattcctttgttgaggccgtatttttgcgaagtctgcccaaagcacgtagtgtttgaagatttcggtcctatgcaatatgaacccatgaaccatgtcaggtcctgacggaagcagcattaagtggatcatcatatgtgccgtagggtagccgagatttagctaacgactttggttacgttcgtgaattacgttcgatgcttaggtgcacggttttttatttttttaaatattaaaccgattattaagagttgaaaatatatatttatagaagctactttcttgaagacaattcagcgtattatacgtggaacatgtttgtgggaagtagcttttttatatgtgaagtttgattcaagtgaaatcgatgcgcagtttgaatgattttttacggatataaaaagtaagaagttattatttgatgataaagaaatgatggtgaaatgagggggagtatcttacaatagaattattaatgagatacgttatgattattgacaatcaaatgcctacggaggacatatgcaaatatatttaagtactttaacagagttagattatgataaatctttaaatagtattgaagaaagttttgatgataatcctgaaacgagttggcaagcacgtgcgaaagtaaaacatttaagaaaatctccttgctataattttgaattagaagtaattgcgaaaaatgaaaataacgatgtcgttggacacgttttattaattgaagtagaaattaatagtgatgataagacgtattatggtttggcaattgcttctttatcagttcatcctgaattgcgtggacaaaaattaggtcgtggcttggttcaagcagtagaagagcgtgcaaaagcgcaagagtatagtacggttgttgtagaccattgttttgactactttgaaaagttgggttatcaaaatgctgctgagcatgacattaaattagaatctggtgatgcaccgttacttgtaaaatatttatgggataatttgacggatgcaccacacggaatcgtaaaatttccagaacatttttattaattgttcatttaagaagtaaaggtattatcatgctataatgaaaggtaattgtttatggaggtgctaacttgaattatcaagccttatatcgtatgtacagaccccaaagtttcgaggatgtcgtcggacaagaacatgtcacgaagacattgcgcaatgcgatttcgaaagaaaaacagtcgcatgcatatatttttagtggtccgagaggtacggggaaaacgagtattgccaaagtgtttgctaaagcaatcaactgtttaaatagcactgatggagaaccttgtaatgaatgtcatatttgtaaaggcattacgcaggggactaattcagatgtgatagaaattgatgctgctagtaataatggcgttgatgaaataagaaatattagagacaaagttaaatatgcaccaagtgaatcgaaatataaagtttatattatagatgaggtgcacatgctaacaacaggtgcttttaatgcccttttaaagacgttagaagaacctccagcacacgctatttttatattggcaacgacagaaccacataaaatccctccaacaatcatttctagggcacaacgttttgattttaaagcaattagcctagatcaaattgttgaacgtttaaaatttgtagcagatgcacaacaaattgaatgtgaagatgaagccttggcatttatcgctaaagcgtctgaagggggtatgcgtgatgcattaagtattatggatcaggctattgctttcggcgatggcacattgacattacaagatgccctaaatgttacgggtagcgttcatgatgaagcgttggatcacttgtttgatgatattgtacaaggtgacgtacaagcatcttttaaaaaataccatcagtttataacagaaggtaaagaagtgaatcgcctaataaatgatatgatttattttgtcagagatacgattatgaacaaaacatctgagaaagatactgagtatcgagcactgatgaacttagaattagatatgttatatcaaatgattgatcttattaatgatacattagtgtcgattcgttttagtgtgaatcaaaacgttcattttgaagtgttgttagtaaaattagctgagcagattaagggtcaaccacaagtgattgcgagtgtagctgaaccagcacaaattgcttcatcgccaaacacagacgtattgttgcaacgtatggaacagttagagcaagaactaaaaacactaaaagcacaaggagtgagtgtcgctcctactcaaaaatcttcgaaaaagcctgcgagaggcatacaaaaatctaaaaatgcattttcaatgcaacaaattgcaaaagtgctagataaagcgaataaggcagatatcaaattgttgaaagatcattggcaagaagtgattgatcatgccaaaaacaatgataaaaaatcactcgttagtttattgcaaaattcggaacctgtggcggcaagtgaagatcacgtacttgtgaaatttgaggaagagatccattgtgaaatcgtcaataaagacgacgagaaacgtagtagtatagaaagtgttgtatgtaatatcgttaataaaaacgttaaagttgttggtgtaccatcagatcaatggcaaagagttcgaacggagtatttacaaaatcgtaaaaacgaaggcgatgatatgccaaagcaacaagcacaacaaacagatattgctcaaaaagcaaaagatcttttcggtgaagaaactgtacatgtgatagatgaagagtgatacatgacaagcgatataatcgtatgtataatgaaagaaacatcattttattgataaatatttattgattttcaaggaggaaatggaatatgcgcggtggcggaaacatgcaacaaatgatgaaacaaatgcaaaaaatgcaaaagaaaatggctcaagaacaagaaaaacttaaagaagagcgtattgtaggaacagctggcggtggcatggttgcagttactgtaactggtcataaagaagttgtcgacgttgaaatcaaagaagaagctgtagacccagatgatattgaaatgctacaagacttagtgttagcagctactaatgaagcgatgaataaagctgatgagcttactcaagaacgtttaggtaaacatactcaaggcttaaacatccctggaatgtgattatagatgcattatccagaacctatatcaaagcttattgatagctttatgaaattgccaggcattggtccaaagacagcccaacgtctggcttttcataccttagatatgaaagaagacgatgttgttcagtttgccaaagcattagtagatgttaaaagagaattaacatattgtagcgtatgtggtcacattactgaaaatgatccatgttatatttgtgaagataagcaaagagatcgttcagttatttgtgttgtggaagatgacaaagatgtcatagctatggaaaaaatgagagaatacaaaggtttatatcacgttttacatgggtctatttcccctatggatggcattggaccagaagatattaatattccttcattgattgaacgcttgaaaaacgatgaagttagcgaattaatcttagctatgaacccgaacttagaaggggaatctacagccatgtatatttctagattagttaagcctataggtatcaaagtgacgagattagcacaagggttatcggtaggtggcgatttagagtatgctgacgaagtaacattatctaaagcaatcgcaggtagaacagaaatgtaatgtcttctattaaacattttagaatttaatactatagtaagaaaagtcacagtgtaatcattgtggctttttttatggtgtggtgtactactttatttgtggtgtggcggtggcatggtttacctagttttactgaggggtggggaatctttatgaagcaaaccattggttgtgatttgttatttctaatagtaatgaagtgaattggattatcgaagtagatctacggttgtggtgtgttggtgctattaatttgataaatgcggttgatggttaatgactaggcaaatgaaattcttttgtaattgaaatgatagatgctgacttagtagttgtacttatttggtctaaagcttattaaatcagcctgtatagtggtgttttgagagattatttaaaacttgtaaatttatttttaatttctggtaaaaaaataaagttctgttttgcggtttttttattatctttttataaaaataaccaccttaattgttttagaaaacgtactattcacaattgtaatttctttaagttcgatttttagaatgagagcgttcggaatggatagtaaaggtgtaatttttactgttgttaagcagtttgaaagcctgtatagtatttatttgttgaggcaaacaaaacaactcaacttaagaaataacttgaattactaacgaaaattaattttaaaaagttattgacttaaatgttaataaaatgtataattaattcttgtcggtaagaaaaatgaacattgaaaactgaatgacaatatgtcaacgttaattccaaaaaacgtaactttaagttacaaacattatttagtatttatgagctaatcaaacatcataatttttatggagagtttgatcctggctcaggatgaacgctggcggcgtgcctaatacatgcaagtcgagcgaacggacgagaagcttgcttctctgatgttagcggcggacgggtgagtaacacgtggataacctacctataagactgggataacttcgggaaaccggagctaataccggataatattttgaaccgcatggttcaaaagtgaaagacggtcttgctgtcacttatagatggatccgcgctgcattagctagttggtaaggtaacggcttaccaaggcaacgatgcatagccgacctgagagggtgatcggccacactggaactgagacacggtccagactcctacgggaggcagcagtagggaatcttccgcaatgggcgaaagcctgacggagcaacgccgcgtgagtgatgaaggtcttcggatcgtaaaactctgttattagggaagaacatatgtgtaagtaactgtgcacatcttgacggtacctaatcagaaagccacggctaactacgtgccagcagccgcggtaatacgtaggtggcaagcgttatccggaattattgggcgtaaagcgcgcgtaggcggttttttaagtctgatgtgaaagcccacggctcaaccgtggagggtcattggaaactggaaaacttgagtgcagaagaggaaagtggaattccatgtgtagcggtgaaatgcgcagagatatggaggaacaccagtggcgaaggcgactttctggtctgtaactgacgctgatgtgcgaaagcgtggggatcaaacaggattagataccctggtagtccacgccgtaaacgatgagtgctaagtgttagggggtttccgccccttagtgctgcagctaacgcattaagcactccgcctggggagtacgaccgcaaggttgaaactcaaaggaattgacggggacccgcacaagcggtggagcatgtggtttaattcgaagcaacgcgaagaaccttaccaaatcttgacatcctttgacaactctagagatagagccttccccttcgggggacaaagtgacaggtggtgcatggttgtcgtcagctcgtgtcgtgagatgttgggttaagtcccgcaacgagcgcaacccttaagcttagttgccatcattaagttgggcactctaagttgactgccggtgacaaaccggagggaaagtggggatgacgtcaaatcatcatgccccttatgatttgggctacacacgtgctacaatggacaatacaaagggcagcgaaacgtgacaaactggaggaaggtggggatgacgtcaaatcatcatgccccttatgatttgggctacacacgtgctacaatggacaatacaaagggcagcgaaaccgcgaggtcaagcaaatcccataaagttgttctcagttcggattgtagtctgcaactcgactacatgaagctggaatcgctagtaatcgtagatcagcatgctacggtgaatacgttcccgggtcttgtacacaccgcccgtcacaccacgagagtttgtaacacccgaagccggtggagtaaccttttaggagctagccgtcgaaggtgggacaaatgattggggtgaagtcgtaacaaggtagccgtatcggaaggtgcggctggatcacctcctttctaaggatatattcggaacatcttcttcagaagatgcggaataacgtggcatattgtattcagttttgaatgtttatttaacattcaaatattttttggttaaagcgatattgcttatgcgagcgcttgactaaaaagaaattgtacattgaaaactagataagtaagtaaaatatagattttaccaagcaaaaccgagtgaataaagagttttaaataagcttgaattcataagaaataatcgctagtgttcgaaagaacactcacaagattaataacgcgtttaaatctttttataaaagaacgtaacttcatgttaacgtttgacttataaaaatggtggaaacatagattaagttattaagggcgcatggtggatgccttggcactagaagccgatgaaggacgttactaacgacgatatgctttggggagctgtaagtaagctttgatccagagatttccgaatggggaaacccagcatgagttatgtcatgttatcgatatgtgaatacatagcatatcagaaggcacacccggagaactgaaacatcttagtacccggaggaagagaaagaaaattcgattcccttagtagcggcgagcgaaacgggaagagcccaaaccaacaagcttgcttgttggggttgtaggacactctatacggagttacaaaggacgacattagacgaatcatctggaaagatgaatcaaagaaggtaataatcctgtagtcgaaaatgttgtctctcttgagtggatcctgagtacgacggagcacgtgaaattccgttggaatctgggaggaccatctcctaaggctaaatactctctagtgaccgatagtgaaccagtaccgtgagggaaaggtgaaaagcaccccggaaggggagtgaaatagaacctgaaaccgtgtgcttacaagtagtcagagcccgttaatgggtgatggcgtgccttttgtagaatgaaccggcgagttacgatttgatgcaaggttaagcagtaaatgtggagccgtagcgaaagcgagtctgaatagggcgtttagtatttggtcgtagacccgaaaccaggtgatctacccttggtcaggttgaagttcaggtaacactgaatggaggaccgaaccgacttacgttgaaaagtgagcggatgaactgagggtagcggagaaattccaatcgaacctggagatagctggttctctccgaaatagctttagggctagcctcaagtgatgattattggaggtagagcactgtttggacgaggggcccctctcgggttaccgaattcagacaaactccgaatgccaattaatttaacttgggagtcagaacatgggtgataaggtccgtgttcgaaagggaaacagcccagaccaccagctaaggtcccaaaatatatgttaagtggaaaaggatgtggcgttgcccagacaactaggatgttggcttagaagcagccatcatttaaagagtgcgtaatagctcactagtcgagtgacactgcgccgaaaatgtaccggggctaaacatattaccgaagctgtggattgtcctttggacaatggtaggagagcgttctaagggcgttgaagcatgatcgtaaggacatgtggagcgcttagaagtgagaatgccggtgtgagtagcgaaagacgggtgagaatcccgtccaccgattgactaaggtttccagaggaaggctcgtccgctctgggttagtcgggtcctaagctgaggccgacaggcgtaggcgatggataacaggttgatattcctgtaccacctataatcgttttaatcgatggggggacgcagtaggataggcgaagcgtgcgattggattgcacgtctaagcagtaaggctgagtattaggcaaatccggtactcattaaggctgagctgtgatggggagaagacattgtgtcttcgagtcgttgatttcacactgccgagaaaagcctctagatagaaaataggtgcccgtaccgcaaaccgacacaggtagtcaagatgagaattctaaggtgagcgagcgaactctcgttaaggaactcggcaaaatgaccccgtaacttcgggagaaggggtgctctttagggttaacgcccagaagagccgcagtgaataggcccaagcgactgtttatcaaaaacacaggtctctgctaaaccgtaaggtgatgtataggggctgacgcctgcccggtgctggaaggttaagaggagtggttagcttctgcgaagctacgaatcgaagccccagtaaacggcggccgtaactataacggtcctaaggtagcgaaattccttgtcgggtaagttccgacccgcacgaaaggcgtaacgatttgggcactgtctcaacgagagactcggtgaaatcatagtacctgtgaagatgcaggttacccgcgacaggacggaaagaccccgtggagctttactgtagcctgatattgaaattcggcacagcttgtacaggataggtaggagcctttgaaacgtgagcgctagcttacgtggaggcgctggtgggatactaccctagctgtgttggctttctaacccgcaccacttatcgtggtgggagacagtgtcaggcgggcagtttgactggggcggtcgcctcctaaaaggtaacggaggcgctcaaaggttccctcagaatggttggaaatcattcatagagtgtaaaggcataagggagcttgactgcgagacctacaagtcgagcagggtcgaaagacggacttagtgatccggtggttccgcatggaagggccatcgctcaacggataaaagctaccccggggataacaggcttatctcccccaagagttcacatcgacggggaggtttggcacctcgatgtcggctcatcgcatcctggggctgtagtcggtcccaagggttgggctgttcgcccattaaagcggtacgcgagctgggttcagaacgtcgtgagacagttcggtccctatccgtcgtgggcgtaggaaatttgagaggagctgtccttagtacgagaggaccgggatggacatacctctggtgtaccagttgtcgtgccaacggcatagctgggtagctatgtgtggacgggataagtgctgaaagcatctaagcatgaagcccccctcaagatgagatttcccaacttcggttataagatccctcaaagatgatgaggttaataggttcgaggtggaagcatggtgacatgtggagctgacgaatactaatcgatcgaagacttaatcaaatttaaatgttttgcgaagcaaaatcacttttacttactatctagttttgaatgtataaattacattcatatgtctggtgactatagcaaggaggtcacacctgttcccatgccgaacacagaagttaagctccttagcgtcgatggtagtcgaacttacgttccgctagagtagaacgttgccaggcaaaaatggatgcgatgagccgcattgagaccgcaaggtctctttttttatgtctaaaatgtcaaaataaaagcaaacacaaagaaaaatggcttgacgaagtgaaaacgtttgaatctgacgaaacgagaaaagagcgcaacgagtttagtagagctaaatgagtaagcgagagacgaagaagaggaaagaagcaagcgattgtcacaagtcaagaaaggttcttagcgacgatggtagccaacttacgttccgctagagtagaacgttgccaggcaaaaatggatgcgatgagccgcattgagaccgcaagatctcttttttttatgtctaaaacgtcaaaataaaagttaacacaaagaaaaatggcttgacgaagtgaaaacgtttgaatctgacgaaacgagaaaagagcgtaacgagtttagtagagctaaatgagtaagcgagagccgaaggagaggaaagaagcaagcgattgtcacaagtcaagaaaggttcttagcgacgatggtagccaacttacgttccgctagagtagaacgttgccaggcaaaaatggatgcgatgagccgcattgagaccgcaaggtctctttttttatgtctaaaatgtcaaaataaaaattaacacaaagaaaaatggcttggcgaagtgaaaacgtttgaatctgacgaaacgagaaaagagcgcaacgagtttagtagagctaaatgagtaagcgagagccgaagaagaggaaagaagcaagcgattgtcacaagtcaagaaaggttcttagcgacgatggtagccaacttacgttccgctagagtagaacgttgccaggcaaaaaaatggatgcgatgagccgcattgagaccgtaaggtctcttttttttatgtctaaaacgttgaaataaaggttaacacaaagaaagatggcttggcgaagtgtgaaattgataatttaataatgtgcacttatgattgtttaaatctgtgactagaagtataagcgaagacattcagaagtattataaaaagtgaacagcagtaagatagtttttaatcataaatcatcttactgctgtttttaggttttatgtctaatatcttttaaatcgaaatacaaaaaggaaattaattattatacaatagacaagctattgcataagtaacactaacttttgtcaaagaagtgttactatataattaatacttttgaaagtaactaattccaaaacattgtaaataaaggaagcgtatatcatgaagcaacctattttaaataaattagaaagtttaaatcaagaagaagcgatttctttgcatgttccgggtcataaaaatatgactatcggtcatttatctcaattatcaatgacaatggataaaactgaaatacctggattagatgatttacatcatcctgaagaagtcattttggaaagtatgaagcaggtggagaaacattcagattatgatgcttatttcttagtgaatggcaccacttcaggaatattatctgtcatccagtctttttcacagaaaaaaggcgatatcttaatggcaagaaatgtacataaatctgtattacatgcgctcgatattagccaacaagaagggcattttattgaaacgcatcaaagtccgttaacgaatcattataataaagttaatttaagccgtttgaataatgacggtcacaaacttgctgtgttgacttatcctaactattacggtgaaacatttaatgtagaagaggttatcaaatctttgcaccaattaaatatccctgtactcattgacgaagcacacggcgcgcactttggattgcaaggatttccagattctacattagattatcaagctgactatgttgttcaatcttttcataaaacgttacctgctttaacgatgggctcggtactttatattcataaaaatgcaccttatagagaaaatattatagaatatctaagctacttccaaacatctagtccttcgtatttgattatggctagtttagagtcagctgcccagttctataaaacatatgatagtaccgtgttttttgataagagagcgcaattaatcgaatgtttggagaagaagggttttgaaatgcttcaagttgatgatccgttgaagctgttgataaaatatgaaggctttacaggtcatgatattcaaaattggtttatgaatgcacatatctatttagaattagcggacgactatcaagcattagcgatattgccgttatggcatcatgatgatacgtatttatttgattcgcttttacgtaaaattgaagatatgattttaccgaaaaaatcagtttctaaagttaaacaaacacaacttttaacaactgaaggtaactataaaccaaaacgctttgaatatgttacttggtgtgatttgaaaaaggcaaaaggtaaagttctggcgcgacatattgtcccgtatccgccagggattcctattattttcaaaggagaaacaataactgaaaatatgatagaattggtaaatgaatatctggaaactggaatgatagttgaaggaattaaaaataataaaattttagttgaggatgaataaaatgtcagcttttataacttttgagggcccagaaggctcaggtaaaacaactgtaattaatgaagtttatcatagattagtaaaagattatgatgtcattatgacaagagaaccgggcggcgttcctactggtgaagaaatacgtaaaattgtattagaaggcaatgatatggacattagaactgaagcaatgttatttgctgcatctagaagagaacatcttgtattaaaggtcataccagctttaaaagaaggtaaggttgtgttgtgtgatcgctatatcgatagttcattagcttatcaaggttatgctagagggattggcgttgaagaagtaagagcattaaacgaatttgcaataaatggattatatccagacttgacgatttatttaaatgttagtgctgaagtaggtcgcgaacgtattattaaaaattcaagagatcaaaatagattagatcaagaagatttaaagtttcacgaaaaagtaattgaaggttaccaagaaatcattcataatgaatcacaacggttcaaaagcgttaatgcagatcaacctcttgaaaatgttgttgaagacacgtatcaaactatcatcaaatatttagaaaagatatgatataattgttagaagaggtgttataaaatgaaaatgattatagcgatcgtacaagatcaagatagtcaggaacttgcagatcaacttgttaaaaataactttagagcaacaaaattggcaacaacaggtgggtttttaagagcaggtaatacaacattcttatgtggtgtcaatgatgaccgtgtagatgaaatattgtctgtgattaatcaaacgtgtggtaatagagaacagttggtttcacctattacacctatgggaggcagtgcggattcgtacattccatatccagttgaagttgaagttggcggtgctactgtatttgttatgccagttgatgcattccatcaattttaattctataatacaatcatcaattagagatacttaaaatagtgtattaataagttattaacaattttgggttgcttgactgcgactagttcagatgccaatagatttgatttttgtggttctaagaataatcacaaatcatggtcgctattgttgcagtaattagttgctctttggcaacctttttatataaaagcaaaagggagtttgtaatgaatggatgaacagcaacaattgacgaatgcatatcattcaaataaattatcgcatgcctatttatttgaaggtgatgatgcacaaacgatgaaacaagttgcgattaattttgcaaagcttattttatgtcaaacagatagtcaatgtgaaacaaaggttagtacatataatcatccagactttatgtatatatcaacaactgagaatgcaattaagaaagaacaagttgaacaacttgtgcgtcatatgaatcaacttcctatagaaagcacaaataaagtgtacatcattgaagactttgaaaagttaactgttcaaggggaaaacagtatcttgaaatttcttgaagaaccaccggacaatacgattgctattttattgtctacaaaacctgagcaaattttagacacaatccattcaaggtgtcagcatgtatatttcaagcctattgataaagaaaagtttataaatagattagttgaacaagacatgtctaagccagtagctgaaatgattagtacttatactacgcaaatagataatgcactggctttaaatgaagaatttgatttattagcattaaggaaatcagttatacgttggtgtgaattgttgcttactaataagtcaatggcacttataggtattattgatttattgaaacaggctaaaaataaaaaactgcaatctttaactattgcagctgtgaatggtttcttcgaagatatcatacatacaaaggtaaatgtagaggataaacaaatatatagtgatttaaaaaatgatattgatcaatatgcgcaaaagttgtcgtttaatcaattaattttgatgtttgatcaactgacggaagcacataagaaattgaatcaaaatgtaaatccaacgcttgtatttgaacaaatcgtaattaagggtgtgagttagatgccaaatgtaataggtgttcagtttcaaaaagcgggaaaattagaatattatacacctaatgatatacaagtagatatagatgactgggtagttgtcgaatctaaaagaggcatagagataggtattgttaaaaatccattaatggatattgctgaagaggatgttgtgttacctcttaaaaatattattcgcattgctgatgacaaagatattgataaatttaattgtaatgaacgagatgctgaaaatgcattaatactatgtaaagacattgtaagagaacaaggtttggacatgcgtttagtcaattgcgaatatacattagataaatcgaaagttatttttaattttacggcggatgatcgtattgattttagaaaattagtaaaaatattagcgcaacatttaaaaacacgtatcgaattgagacaaattggtgtaagggatgaagccaaattgcttggcggtatcggaccttgtggtaggtcgttatgttgttctacatttttaggagattttgaaccagtatcgattaagatggctaaggatcaaaatttatcattaaatccaactaaaatttccggtgcatgtggtcgtttgatgtgttgtttaaaatatgaaaatgactactatgaggaagtacgtgcgcaattacctgatatcggtgaagcaattgaaacgcctgatggtaacgggaaagtagttgctttaaatatattagacatttctatgcaggtgaagcttgagggacatgaacagccacttgaatataaattagaagaaatagaaactatgcattaaggaggcattattacatttggatcgcaatgaaatatttgaaaaaataatgcgtttagaaatgaatgtcaatcaactttcaaaggaaacttcagaattaaaggcacttgcagttgaattagtagaagaaaatgtagcgcttcaacttgaaaatgataatttgaaaaaggtgttgggcaatgatgaaccaactactattgatactgcgaattcaaaaccagcaaaagctgtgaaaaagccattaccaagtaaagataatttggctatattgtatggagaaggatttcatatttgtaaaggcgaattatttggaaaacatcgacatggtgaagattgtctgttctgtttagaagttttaagtgattaatcaagcacactcaaatagtgttataattataaatgaatatggtttggataagtctgagacaatgcatgtttcaggctttaattgtgtataaagttttggtgattgcataagagatagcggtactaaatgttattattaagtgtgcacgcagtatcattagttataaaatgtagctgttaaaagccaaaaatacatcgaatgtagataggcatataatataaaaagagatttcaattactcaatagaaaaaggttgtcttcataggagttaaaaatgttaaaagagaatgaacgatttgatcaactaatcaaagaagattttagtattattcaaaatgatgatgttttttcgttttcaacggatgctttgttgttagggtattttacaaaacctagaacaaaagatattgtgttggacttatgttcaggcaatggggtgatacccttgttattgtttgcgaaacatccacgacatatagaaggtgttgagattcaaaaaacacttgtcgatatggcgcgacgcacatttcaattcaatgatgttgatgaatatctaacaatgcatcacatggatttgaaaaacgttactaaagtatttaaaccttcacaatatactttagtaacgtgtaatccgccttattttaaagagaatcagcaacaccaacatcaaaaagaagcacataagatagcgagacatgagattatgtgtacacttgaagattgcatgattgcagcccgtcatttattaaaagagggtggcaggctaaacatggtacatcgtgcagatagactaatggatgtcttgtttgaaatgagaaaagtgaatattgaacctaagaaagtcgtttttatatatagtaaagtagggaaatcggcacaaacgatagttgtagaaggtcgaaaaggtggaaatcaaggtttagaaatcatgcccccattttatatttataatgaagatggtaattatagcgaagaaatgaaggaagtatattatggatagtcattttgtatatattgtaaaatgtagtgatggaagtttatatacaggatacgctaaagacgttaatgcacgtgttgaaaaacataaccgaggtcaaggagccaaatatacgaaagtaagacgtccggtgcatttagtttatcaagaaatgtatgagacaaagtctgaagcattgaagcgtgaatatgaaattaaaacttataccagacaaaagaaattgcgattaattaaggagcgatagtatggctgtattatatttagtgggcacaccaattggtaatttagcagatattacttatagagcagttgatatattgaaacgtgttgatatgattgcttgtgaagacactagagtaactagtaagctgtgtaatcattatgatattccaactccattaaagtcatatcacgaacataacaaggataagcagactgcttttatcattgaacagttagaattaggtcttgacgttgcgctcgtatctgatgctggattgcccttaattagtgatcctggatacgaattagtagtggcagccagagacgctaatattaaagtagagactgtgcctggacctaatgctgggctgacggctttgatggccagtggattaccttcatatgtatatacatttttaggatttttgccacgaaaagagaaagaaaaaagtgctgtattagagcaacgtatgcatgaaaatagcacattaattatatacgaatcaccgcatcgtgtgacagatacattaaaaacaattgcaaaaatagatgcaacacgacaagtatcactagggcgtgaattgactaagaagtttgaacaaattgtaactgatgatgtaacacaattacaagcattgattcagcaaggcgatgtaccattgaaaggcgaatttgttatcttgattgagggtgctaaagcgaacaatgagatatcgtggtttgatgatttatctatcaatgagcatgttgatcattatattcaaacttcacagatgaaaccaaaacaagctattaaaaaagttgctgaagaacgacaacttaaaacgaatgaagtatataatatttaccatcaaataaattaatcactttatcgattatatgaaattttaaacgattttataaacgcaagctgtaattttaaatggtaagttatcattttgcattgatactgataaaatgatgttgactatgataaaaaaatgatgacatcgacgttttttaatgtaaaataaatacattgaaagtaataaataccttaacattgaataagatgaaaatgagatgacgagataaatgttcgcgtccgttgaaatgcatagaaatcttagatattatttgaagtgagacattacgaggaggaacagttatggctaaagaaacattttatataacaaccccaatatactatcctagtgggaatttacatataggacatgcatattctacagtggctggagatgttattgcaagatataagagaatgcaaggatatgatgttcgttatttgactggaacggatgaacacggtcaaaaaattcaagaaaaagctcaaaaagctggtaagacagaaattgaatatttggatgagatgattgctggaattaaacaattgtgggctaagcttgaaatttcaaatgatgattttatcagaacaactgaagaacgtcataaacatgtcgttgagcaagtatttgaacgtttattaaagcaaggtgatatctatttaggtgaatatgaaggttggtattctgttccggatgaaacatactatacagagtcacaattagtagacccacaatacgaaaacggtaaaattattggtggtaaaagtccagattctggacaccaagttgaactagtaaaagaagaaagttatttctttaatattagtaaatatacagaccgtttattagagttctatgaccaaaatccagattttatacaaccaccatcaagaaaaaatgaaatgattaacaacttcattaaaccaggacttgctgatttggctgtttctcgtacatcatttaactggggtgtccatgttccgtctaatccaaaacatgttgtttatgtttggattgatgcgttagttaactatatttcagcattaggctatttatcagatgatgagtcactatttaacaaatactggccagcagatattcatttaatggctaaggaaattgtgcgattccactcaattatttggcctattttattgatggcattagacttaccgttacctaaaaaagtctttgcacatggttggattttgatgaaagatggaaaaatgagtaaatctaaaggtaatgtcgtagaccctaatattttaattgatcgctatggtttagatgccacacgttattatctaatgcgtgaattaccatttggttcagatggcgtatttacacctgaagcatttgttgagcgtacaaatttcgatctagcaaatgacttaggtaacttagtaaaccgtacgatttctatgattaataagtactttgatggcgaattaccagcgtatcaaggtccacttcatgaattagatgaagaaatggaagctatggctttagaaacagtgaaaagctatactgaaagcatggaaagtttgcaattttctgtggcattatctacggtatggaagtttattagtagaacgaataagtatattgacgaaacaacgccttgggtattagctaaggacgatagccaaaaagatatgttaggcaatgttatggctcacttagttgaaaatattcgttatgcagctgtattattacgtccattcttaactcatgcgccgaaagagatttttgaacaattgaacattaacaatcctcaatttatggaatttagtagtttagagcaatatggtgtgcttactgagccaattatggttactgggcaacctaaacctattttcccaagattggatagcgaagcggaaattgcatatatcaaagaatcaatgcaaccgcctgctactgaagaggaaaaagaagagattcctagcaaacctcaaattgatattaaagactttgataaagttgaaattaaggcagcaacgattattgatgctgaacatgttaagaagtcagataagcttttaaaaattcaagtagacttagattctgaacaaagacaaatcgtatcaggaattgccaaattctatacaccagatgatattattggtaaaaaagtagcaattgttactaacttgaaaccagctaaattaatgggacaaaaatctgaaggtatgatattatctgctgaaaaagatggtgtattaaccttagtaagtttaccaagtgcaattccaaatggtgcagtgattaaataactgtatttttaaaaattaggagagataattatgttaatcgatacacatgtccatttaaatgatgagcaatacgatgatgatttgagtgaagtgattacacgtgctagagaagcaggtgttgatcgtatgtttgtagttggttttaacaaatcgacaattgaacgcgcgatgaaattaatcgatgagtatgattttttatatggcattatcggttggcatccagttgacgcaattgattttacagaagaacacttggagtggattgaatctttagctcagcatccaaaagtgattggtattggtgaaatgggattagattatcactgggataaatctcctgcagatgttcaaaaggaagtttttagaaagcaaattgctttagctaagcgtttgaagttaccaattatcattcataaccgtgaagcaacacaagactgtatcgatatcttattggaggagcatgctgaagaggtaggcgggattatgcatagctttagtggttctccagaaattgcagatattgtaactaataagctgaatttttatatttcattaggtggaccagtgacatttaaaaatgctaaacagcctaaagaagttgctaagcatgtgtcaatggagcgattgcttgttgaaaccgatgcaccgtatctttcgccacatccatatagagggaagcgaaatgaaccggcgagagtaactttagtagctgaacaaattgctgaattaaaaggcttatcttatgaagaagtgtgcgaacaaacaactaaaaatgcagagaaattgtttaatttaaattcataaagttaaaagtgagaaagatcaccgccataaatgtaaacgatgctatattcgtttaatatgctatggttctttctcacttttttaaattaaaatatcgtgcatgtgcaatacgtgcgatagagatggttagagctttgaaattaagaattgtaggaaggcgttttaaatgaaaatcaatgagtttatagttgtagaaggacgagatgatactgagcgtgttaaacgagctgttgaatgtgatacgattgaaacgaatggtagtgccatcaacgaacaaactttagaagtaattagaaatgctcaacaaagtcgaggcgttattgtattaacagatccagatttcccaggagataaaattagaagtacaattactgaacatgtcaaaggtgttaaacatgcgtatattgatagagaaaaagctaaaaataaaaaagggaaaattggtgttgaacatgccgacttaattgatattaaagaagcgttaatgcatgttagttcaccctttgatgaagcttatgaatcaattgataaatctgtgctaatagagttggggttaatcgttgggaaagatgcaaggcgccgtagagaaattttaagtagaaaattgcgaatcggccattccaatggtaagcagttattgaaaaagttaaatgcatttggttataccgaagcggatgtaaggcaagctttagaagatgaatgaggaagtgaaaatgttggataataaagatattgcaacaccatcaagaacgcgagcgttgttagataaatatggctttaattttaaaaaaagtttaggacagaactttttaatagatgtgaatatcattaataatatcattgatgcaagtgatattgatgcacaaactggggtgattgaaattggtccaggtatggggtcgttgacagaacaattggccagacatgctaaaagagtattggcatttgaaattgatcaacgtttaatacctgtattaaatgatacactatcaccttatgataatgtgacggtgattaatgaagatattttaaaagcgaatattaaagaagctgttgaaaatcatttacaagattgcgaaaaaataatggttgttgcaaacctgccgtactatattacgacgccaattttattaaatttaatgcaacaagatataccaattgatggctacgtggtgatgatgcaaaaagaagtgggcgaacgcttaaatgctgaagtaggttcaaaagcatatggttcattatcaattgtcgtacaatactatacagagactagtaaagtattaacggtacctaaatctgtatttatgccaccacctaatgttgattcaatagttgtaaaactgatgcagagaactgaaccgttagtaacagtagataacgaggaagcattttttaagttagcaaaagcagcatttgcacaaagaagaaagacaattaacaataactatcaaaattattttaaagatggtaaacaacacaaagaagtgattttacaatggttggaacaagcgggtattgatccaagacgtcgcggtgaaacgctatctattcaagattttgctaaattgtatgaagaaaagaaaaaattccctcaattagaaaattaaatgattgacaaagcaaagcactattgttaaaatttaaattttgtttgacgaaaacgctgcaaatatggtattatgtaacttgtagcgaggtggagcaatatgccaaaatcaattttggacatcaaaaattctattgattgtcatgtaggaaatcgtattgtactgaaagccaatggaggccgtaagaaaacaataaaacgttctggaattttaaaagaaacatatccgtcagttttcattgttgagttagatcaagacaaacacaactttgagagagtatcttatacatacactgatgtgttaactgaaaatgttcaagtttcatttgaagaggataatcatcacgaatcaattgcacactaaataagacatatagagatgttagacgtttcttagtataagaagtaaatattatgataattatttgagtgttgggcattatgttcaatactctttttatttacaaaatgtttaacactgatgtttcgcttatagatttttcagtaaatggataattgtatttataaacacaaatacaagtaaatactaagtaattagatggagaaaattacttttttattaaaaaaacactaaaaaacaaattaaaatgtcaaatattaattctctttatgttaaaatcatcatattaagataacgaaaagagggcgcaaaaatgatatatgaaacggcaccagccaaaattaattttacgctcgatacactttttaaaagaaatgatggctatcatgagattgaaatgataatgacaacagttgatttaaatgatcgtttaactttccataaaagaaaagatcgaaagatagttgttgagattgaacataattatgtgccttctaatcataaaaatctcgcatatcgtgcagcgcaactatttattgagcaatatcaactaaagcaaggtgtaacaatttctatcgataaagaaatacctgtttctgctggcttagctggaggttcggctgatgcagcagcaacgttgagaggattgaatcgactttttaatataggggcgagtttggaagaattggctctactaggcagtaaaatcgggacagatattccgttttgtatttataataaaactgcactatgtactggaagaggagagaaaattgagtttttaaataaaccaccttcagcttgggtgattcttgctaaaccaaacttaggcatatcatcaccagatatatttaagttgatcaatttagataagcgttacgacgtacatacgaaaatgtgttatgaggccttagaaaatcggaattatcaacaattatgtcaaagtttgtctaatcgattagagccaatttctgtttcaaaacacccacaaatcgataaattaaaaaacaatatgttgaaaagtggtgcagatggtgcgttaatgagtggaagcggaccgactgtgtatgggctagcacgaaaagaaagccaagcaaaaaatatttataatgcagttaacggttgttgtaatgaagtgtacttagttagactattaggatagaagggttgaaaagatgagatataaacgaagcgagagaattgtttttatgacgcaatatttgatgaaccatccgaataaattgattccattaactttttttgtgaaaaaatttaaacaggcgaagtcttcaataagtgaagatgtccaaattataaaaaatacattccaaaaagaaaagttaggtacagtaattactactgctggcgcaagtggtggtgttacgtataaaccaatgatgagtaaagaagaggcgactgaagttgttaatgaggtcattactctattagaagagaaagaacgtttgttacctggcgggtatttatttttatcagatttggtaggtaatccatcgctactaaacaaagttggtaagttaattgccagtatttacatggaagaaaaattagatgctgttgttaccattgcgacaaaaggtatttcattggcaaatgcggttgctaatattttaaatttaccagtagtagtgattagaaaagacaacaaggtgactgaaggttctacagtttcaattaattacgtttcaggatcttcaagaaaaatagagacaatggtactttcgaagagaactttagcagaaaattcaaatgttttagttgtcgatgattttatgagggctggtggctctattaatggtgttatgaatttaatgaatgagtttaaagcccatgtaaaaggggtatcagtacttgtagaatcaaaagaagttaaacaaagattgattgaagattatacttccttagtgaaattatctgatgtagatgaatataatcaagagtttaacgtagaacctggcaacagtttatctaagttttcataaaaggagttttagtattatgaaaatcattaacacaacaagattaccggaagcacttggaccatattcgcatgcaacagttgtaaatggtatggtttatacttctggtcagattccattgaatgttgatgggaaaatcgtaagcgctgatgttcaagcacagacaaaacaagttttagaaaatttaaagattgttttggaagaagcaggatctgatttgaattctgttgcgaaagcgaccattttcattaaagatatgaatgatttccaaaaaataaatgaagtgtatggtcaatattttaatgaacacaagccagcgcgtagttgtgtagaggttgcgcgtttgccaaaagatgtgaaagtagaaattgaattagtaagtaaaattaaggaattataattttcgattaatatgtttaatcaagcttctaaataaaacagagagatatatactataggggggctcactacatgaaagtgacagatgtaagacttagaaaaatacaaacagatggacgaatgaaagcactcgtttccattacattagatgaagctttcgtaattcatgatttacgtgtaattgaaggaaactctggcttgttcgttgcaatgccaagtaaacgtacaccagatggtgaattccgcgacatcgcgcatcctattaattcagatatgagacaagaaattcaagatgcagtgatgaaagtatatgatgaaacagatgaagtagtaccagataaaaacgctacatcagaagattcagaagaagcttaatcaattttatatttagcgatgtaatacatttgcaataagttgatttgatactgtcgataaagcataaagctttgtcggcagtttttttagtttgtattaatgttaattttatgaaatgaaaggctaataaatatttatgttaacagattatgatgatatgaaaattattgatacattgctgataaaaattgcgtttgaatgatgctcgtatttttgaagtaagaaaaagttgtttttaaaattacaacgaattaaaaacaatgccttttatatgttgaaagagtattgcagattaaattataataatgacgaagtgtaaaatttaatgggggttaatgttcatgcgaagacacgcgataattttggcagcaggtaaaggcacaagaatgaaatctaaaaagtataaagtgctacacgaggttgctgggaaacctatggtcgaacatgtattggaaagtgtgaaaggctctggtgtcgatcaagttgtaaccatcgtaggacatggtgctgaaagtgtaaaaggacatttaggcgagcgttctttatacagttttcaagaggaacaactcggtactgcgcatgcagtgcaaatggcgaaatcacacttagaagacaaggaaggtacgacgattgttgtatgtggtgatacaccgctcatcacaaaggaaacattagaaacattgattgcgcatcatgaggatgctaatgctcaagcaacagtattatctgcatcgattcaacatccatatggatacggaagaatcgttcgaaatgcgtcaggtcgtttagaacgcatagttgaagagaaagatgcaacgcaagctgaaaaggatattaatgaaattagttcaggtatttttgcgtttaataataaaacgttgtttgaaaaattaacacaagtgaaaaatgataatgcgcaaggtgaatattacctccctgatgtattgtcgttaattttaaatgatggcggcatcgtagaagtctatcgtaccaatgatgttgaagaaatcatgggtgtaaatgatcgtgtaatgcttagtcaggctgagaaggcgatgcaacgtcgtacgaatcattatcacatgctaaatggtgtgacaatcatcgatcctgacagcacttttattggtccagacgttacaattggcagtgatacagtcattgaaccaggcgtacgaattaatggtcgtacagaaattggcgaagatgttgttattggtcagtactctgaaattaacaatagtacgattgaaaatggtgcatgtattcaacagtctgttgttaacgatgctagcgtaggagcgaatactaaggtcggaccgtttgcgcaattgagaccaggcgcgcaattaggtgcagatgttaaggttggaaattttgtagaaattaaaaaagcagatcttaaagatggtgcaaaggtttcgcatttaagttatattggcgatgctgtaataggcgaacgtacgaatattggctgtggaacgataacagttaactatgatggtgaaaataaatttaaaactatcgtcggcaaagattcatttgtcggatgcaatgttaatttagtagcgccagtaacggttggtgatggtgtattggtggcagctggttccacaatcacagatgacgtaccaaatgacagtttagctgtggcaagagcaagacaaacaacaaaagaaggatataggaaataatcatttacgtatttaaaatggctaggataaaaggataatcctatgtaatattaatgtaatctttatgatttaatgattcgcatagtaatggagttacattttatatataatagtaattgcgtaagtaaataattggaggactataaatgttaaataatgaatataagaattcgtcattaaagattttttcattgaaaggaaacgaagcattagcgcaagaagttgctgaccaagtaggaattgaactaggtaaatgttcagttaaacgttttagtgatggagaaattcaaattaatatcgaagagagtattcgtggttgtgacgtatttattattcaaccaacatcatatcctgtgaatctacatttaatggaattattaattatgattgatgcttgtaaacgtgcttctgcagcaacaatcaatattgtagttccatattatggatatgcaagacaagatagaaaagcccgtagccgtgagccaatcactgctaaattagttgcaaacttaatcgaaacagctggcgcaactcgtatgattgcgttagacttacatgcaccacaaattcaaggattctttgatattccaattgaccacttaatgggtgtgccaattcttgctaaacatttcaaagatgatccgaatattaacccagaagaatgtgtcgttgtttcaccagaccatggcggtgttacacgtgcacgtaaattagctgacattttaaaaactccaattgcaattatagataaacgtcgtcctagaccaaatgttgctgaagtgatgaacattgttggtgagattgaaggacgtacggcaattattattgacgatattattgatacagcaggtacaatcacgttagctgcacaagcattaaaagataaaggtgctaaagaagtatatgcttgttgtacacaccctgttttatcaggaccggctaaagaacgtatcgaaaattctgctataaaagaattaatcgtaacaaactcaattcatttagatgaagaccgcaaaccatctaacactaaagaattatctgttgctggtttaatcgcacaagctatcattcgtgtatacgaaagagaatcagttagcgtattatttgactaatatttaaaaggcgtttgacgaacatattccaaacgtgtataatagtttcgttcgtgattatacgaataaataaacacttgcaagcaacgatgatgttgatgggtaagtgaggtgctcgttttgagcaaaaatgaaaggtggaaatgagaatggcttcattaaagtcaatcatccgtcaaggtaaacaaacacgttcagatcttaaacaattaagaaaatctggtaaagtaccagcagtagtatacggttacggtactaaaaacgtgtcagttaaagttgatgaagtagaattcatcaaagttatccgtgaagtaggtcgtaacggtgttatcgaattaggcgttggttctaaaactatcaaagttatggttgcagactaccaattcgatccacttaaaaaccaaattactcacattgacttcttagcaatcaatatgagtgaagaacgtactgttgaagtaccagttcaattagttggtgaagcagtaggcgctaaagaaggcggcgtagttgaacaaccattattcaacttagaagtaactgctactccagacaatattccagaagcaatcgaagtagacattactgaattaaacattaacgacagcttaactgttgcagatgttaaagtaactggcgacttcaaaatcgaaaacgattcagctgaatcagtagtaacagtagttgctccaactgaagaaccaactgaagaagaaatcgaagctatggaaggcgaacaacaaactgaagaaccagaagttgttggcgaaagcaaagaagacgaagaaaaaactgaagagtaattttaatctgttacattaaagtttttatactttgtttaacaagcactgtgcttattttaatataagcatggtgctttttgtgttattataaagcttaattaaactttattgctttgtactaaagttaaattaattttagtgagtaaaagacattaaactcaacaacgatacatcataaaaattttaatgtacttgattttaaaatacatacttactaatctaaagaataatgataattgatggcaatggcggaaaatagatgttgtcattataataataaatgaaacaattatgttggaggtaaacacgcatgaaatgtattgtaggtctaggtaatataggtaaacgttttgaacttacaagacataatatcggctttgaagtcgttgattatattttagagaaaaataatttttcattagataaacaaaagtttaaaggtgcatatactattgaacgaatgaacggagataaagtgttatttatcgaaccaatgacaatgatgaatttgtcaggtgaagcagttgcaccgattatggattattacaatgttaatccagaagatttaattgtcttatatgatgatttagatttagaacaaggacaagttcgcttaagacaaaaaggaagtgcgggcggtcacaatggtatgaaatcaattattaaaatgcttggtacagaccaatttaaacgtattcgtattggtgtgggaagaccaacgaatggtatgacggtacctgattatgttttacaacgcttttcaaatgatgaaatggtaacgatggaaaaagttatcgaacacgcagcacgcgcaattgaaaagtttgttgaaacatcacgatttgaccatgttatgaatgaatttaatggtgaagtgaaataatgacaatattgacaacgcttttaaaagaagataatcattttcaaggccttaatcaggtatttggacaagcaaacacactagtaactggtctttccccgtcagctaaagtgacgatgattgctgaaaaaaatgcacaaagtaatcaacagttattattaattaccaataatttataccaagcagataaattagaaacagatttacttcaatttatagatgctgaagaattgtataagtatcctgttcaagatattatgaccgaagagttttcaacacaaagccctcaactgatgagtgaacgtatcagaactttaactgcgttagctcaaggtaagaaagggttatttatcgttcctttaaatggtttgaaaaagtggttaactcctgttgaaatgtggcaaaatcaccaaatgacattgcgtgttggtgaggatatcgatgtggaccaatttcttaacaaattagttaatatggggtacaagcgggaatccgtggtatcgcatattggtgaattctcattgcgaggaggtattatcgatatctttccgctaattggggaaccaatcagaattgagctatttgataccgaaattgattctattcgggattttgatgttgaaacgcagcgttccaaagataatattgaagaagtcgatataacaactgcaagtgattatatcattactgaagaagtgatcagccaccttaaagaagagttaaaaactgcatatgaaaatacaagacccaaaatagataaatcagtgcgcaatgatctgaaagaaacgtatgaaagctttaaattattcgaaagtacatactttgatcatcaaatactacgtcgtttagtagcatttatgtatgaaacaccttcgacaattattgattatttccaaaaagatgcaatcattgcggttgatgaatttaatcgtattaaagaaactgaagaaagtttaacagtagagtctgattcgtttattagcaacattattgaaagtggtaatggatttataggacaaagttttataaaatatgatgattttgaaacgttgattgaaggctatcctgtcacttatttttcattattcgctacaacaatgccgataaaactaaatcatattattaaattttcatgtaaacctgtccaacaattttatgggcaatatgacattatgcgttctgaatttcaacgatatgttaatcaaaactatcatatcgtggttttggtcgaaaccgaaactaaagttgaacgtatgcaagcgatgttaagtgaaatgcatattccatcaataacaaaattgcatcgctcaatgtcatcggggcaagcagtgattattgaaggcagtttatctgaaggatttgaactacctgatatgggattagttgtcattactgaacgtgagctttttaaatcaaaacagaaaaagcaacgaaaacgtacgaaagctatttcaaatgctgaaaaaattaagtcttaccaagatttaaatgtgggagattatattgttcatgtgcatcatggtgttggtagatatttaggtgttgagacgctcgaagtagggcaaacacatcgtgattatattaaattacaatataaaggtacggatcaactatttgttccagtagatcaaatggatcaagttcaaaaatatgtagcttcggaagataagacgccaaaattaaataaactcggtggcagtgaatggaaaaaaacaaaagctaaagttcaacaaagtgttgaagatattgctgaagagttgattgatttatataaagaaagagaaatggcagaaggttatcaatatggggaggacacagctgagcaaacaacatttgaattagattttccatatgaacttacgcctgaccaagcgaaatctatcgatgaaattaaggatgacatgcaaaaatcgcgtccaatggatcgcttgctatgtggtgatgttggttatggtaaaaccgaagttgcagtgagagcagcattcaaagctgtaatggaaggaaagcaggttgcatttttagttcctacaactattttagctcagcaacattatgagacgttaattgagcgtatgcaggattttcctgttgaaattcaattaatgagtcgttttagaacgccaaaagagataaaacaaactaaggaaggacttaaaactgggtttgttgacatagttgttggtacacacaaattacttagtaaagatatacagtataaagatttagggctgttgattgtagatgaagaacaacgatttggtgtacgccataaagagcgtattaaaacattaaaacataatgtagatgtactaacattgactgcaaccccaatacctagaacattgcatatgagtatgctaggtgtgcgcgatttgtcagtgattgaaacgccgccagaaaatcgtttcccagttcaaacatatgtattagaacagaacatgagttttatcaaagaagctttagaaagagaactatcccgtgatggccaagtattttatctttataataaagtgcaatccatttatgaaaaacgagaacaactccagatgttaatgccagatgctaacattgcagttgctcatggacaaatgacagagcgtgatttagaagaaacgatgttaagttttatcaataatgaatatgatattttagtaacgacgacgattattgaaacaggtgtcgatgtcccaaatgcaaatactttgatcattgaagatgcagatcgctttggattgagtcagttgtatcaattaagaggtcgtgttggtcgttcaagtcgtattggttatgcatacttcttacatccagcaaataaggtactaactgagactgcagaagatcgattacaagcgattaaagaatttacggagttaggctcaggatttaagattgcgatgcgtgatttgaacattcgtggtgctggtaatttgttaggtaaacaacagcacggctttattgatacagttggatttgatttgtacagtcaaatgttagaagaagctgtaaatgaaaaacgtggtattaaggaaccagaatctgaggtgccagaagtcgaagttgatttaaacttggatgcatatttgccaacagaatatattgcaaatgaacaagctaaaattgaaatttataaaaagctacgaaaaactgaaacatttgatcaaattatcgacattaaagatgaattaattgatcgtttcaatgattatcctgttgaagtagcacgtttgcttgatatagtggaaataaaagtacacgcattacattcaggtatcacgttgattaaagataaagggaaaataattgatattcatttatctgtaaaagccactgaaaatattgatggcgaagtgctgttcaaagcaacacaacctttaggtagaacaatgaaggttggtgttcaaaataatgcaatgacaattactttaacgaaacaaaatcaatggcttgatagtttgaagtttttagttaagtgcattgaagaaagtatgagaatcagtgatgaagcataaagaagcatttaatggcgttgtcgtgttaactgctgcattaattgtcattaaaattctgagtgctgtatatcgaattccatatcaaaatatattaggcgatacaggtttgtatgcatatcaacaagtgtatccaattgtagcattaggaatgatattatcgatgaatgccattcctagtgcaattacacaaaatatagggaagtatcatagtgacgaagcatatgcaaaagcagtcgcttatatacaattagttggtatgttattatttattgctatttttgtgtttgcgaacaacattgcacatatgatgggtgatagccatttaacacctatgattcaagctgcaagtttaagctttatatttataggtatgcttggcgtgttaagaggttattatcaatctgcaaataatatgacagttccggctatttcccaggttatagaacaagttatacgagtaggtattatcattgttactattgttatttttgtagatagaggttggacgatatatgaagcgggaacaattgctattttagcatcaacgataggttttttaggttcttcaatttatttagtagcgcaccgaccttttaagtttaaaatggtaaataacactgcaaagattgtttggaaacagttcgcactttcggttttgattttcgctatcagtcaattaatcgtaattttatggcaagtgattgatagtgttactattattaagtcacttcaagcgatacgcgtgccattcgatgttgccataactgaaaaaggagtctatgaccgtggtgcatcatttattcagatgggattgattgtaactacaacatttagttttgcgctcattcctctgttaagtgacgcaatcaaaatgaacaatcaggtacttatgaatcgttatgcaaatgcgtcattaaagattacgattttaataagtacagcagcgggaataggattaattaatttattgcctttaatgaacggtgtattttttaagacgaatgatttaaccttaacgttaagcgtttatatgattacggtcatttgtgtatcgttaattatgatggatatggcattattacaagctcaacatgctgtgagacctatttttgtcggtatgacggcaggattggttattaaatttatacttaatatcattttgattcgtttaagtggcattattggtgcgagcattagtactgttgtatcattaattatattcggtacgattatccatattgctgtcacgagaaaataccatttacatgcgatgagacgattttttatcaatgttgttttaggtatggtatttatgtcgattgttgtacaatgcgtgttaaacgtagtgacaacacacggtagaatcactggactcattgaattattatgtgcagcagtattaggtatcattgcattgtttttctatatttttagatttaatgttttgacatataaagagttaacttatttaccatttggttcaaagttgtatcaaattaagaaaggaagacgttgatggcacataccattacgattgttggcttaggaaactatggcattgatgatttgccgctagggatatataaatttttaaagacacaagataaagtttatgcaagaacgttagatcatccagttatagaatcattgcaagatgaattaacatttcagagttttgaccatgtttatgaaacacatgaccaatttgaagatgtctataatgatattgtggcgcaattggttgaagctgctaatgaaaaagatattgtctatgcggttccgggtcatcctagagttgctgagacaactacagtgaaattactggctttagcaaaggacaatactgatatagatgtgaaagttttaggtgggaaaagctttattgatgatgtttttgaagcagttaatgtagatccaaatgatggcttcacactgttagatgcgacatcattacaagaagaaacacttaatgttagaacgcatacattgattacgcaagtttatagtgcaatggttgctgctaatttgaaaatcactttaatggaacgatatgctgatgattatcctgttcaaattgtcactggtgcacgaagcgatggtgcggataacgttgtgacatgcccattatatgaattggatcatgatgaaaatgcattcaataatttgacgagtgtattcgtaccaaaaattacaacaccgacatatttgtatcatgactttgattttgcgacggaagtgattgatactttagttgatgaagataaaggttgtccatgggataaagtgcaaacgcatgaaacgcttaaacgttatttacttgaagaaacatttgaattgttcgaagctattgacaatgaagatgattggcatatgattgaagaactaggagatattttattacaagtgttattgcatactagtattggtaaaaaagaagggtatatcgacattaaagaagtgattacaagtcttaatgctaaaatgattcgtagacacccacacatatttggtgatgctaatgctgaaactatcgatgacttaaaagaaatttggtctaaggcgaaagatgctgaaggtaaacagccaagagttaaatttgaaaaagtatttgcagagcattttttaaatttatatgagaagacgaaggataagtcatttgatgaggccgcgttaaagcagtggctagaaaaaggggagagtaatacatgagattagataaatatttaaaagtatcacggttaataaagcgacgtacgctagcaaaagaggtaagtgatcaaggtagaattacaataaatggtaatgttgctaaagctggatcggatgttaaagttgaagatgtgctgacgattcgctttggtcaaaaattagtaacagttaaagtaactgcattaaatgaacatgcatctaaagataacgcgaagggcatgtatgaaatcattgaagagcgtcgacttgaagaagcgtaaattggaggtgacaagcaatgaaaaataaagtagaacatatagaaaatcagtacacgtcgcaagagaataagaaaaaacaacgtcaaaaaatgaaaatgcgtgttgttcgtaggcgtattacagtatttgcgggcgtattacttgcgataattgttgttttatcaatcttgcttgttgtccaaaaacatcgcaatgatattgatgcacaggagcgaaaagcgaaagaagcacagtttcaaaagcaacaaaatgaagaaattgcgttaaaagaaaagttgaataatctgaatgacaaagattatattgaaaaaattgcgcgtgatgattattacttaagcaacaaaggtgaagtgatttttaggttgccagaagacaaagattcgtctagctcaaaatcttcgaaaaaataaatccaaattgattcaaaattatccgagtatagacattgtgaaaaaatccaaacaaggatataataagggaaaatcgaatcaaatcgggaggatttatttaacatatgtcaatcgaagttggaaataagcttaaaggtaaagtcactggtattaaaaagtttggtgcattcgtagaattacctgaaggaaaaagtggtttagttcacattagtgaagtcgcagataattatgttgaaaacgtagaagaacacctttctgttggtgatgaagtagacgtaaaagtattatctattgctgatgatggaaaaattagtctttcaattaagaaagctaaagaccgtccacgtagacaacatacgagtaaaccaagtcatcaaaaaccagtgcaaaaagccgaagattttgaaaagaaattaagcaatttcttaaaagatagtgaagataaattaacttcaatcaaacgtcaaacagaatctagacgcggtggcaaaggttctagacgttaattaaaataaataaagactgtttcgataaggaatatatttagaatgatgcgtatcgaataatcgattgcagcgttagacaatctaagactgtttcttaaataaggagcagtctcttttatttgtaatgatataactaagacttataccatttttgaaaattgtaaaagtgaggtgatgttatgcagttaaatagtaatggttggcatgttgatgaccatattgttgtcgctgtttctacaggtattgatagtatgtgtttattgtatcaactactaaatgattataaagatagttatagaaaactaacatgtttacatgtcaatcatggcgttaggtcagcttcaatcgaggaagccagatttttagaagcatactgcgaacgtcatcacatcgatttacatatcaaaaagttggatttgtcgcatagtctcgaccgaaataacagcattcagaatgaagctcgaattaaacgttacgaatggtttgatgaaatgatgaatgtattagaagcggatgtattgctaacggcgcatcatttggacgatcaattagaaactattatttatcgcatttttaatgggaaatcaacgcgtaataaactaggatttgatgagttatcgaagcgaaaaggttatcagatttatagaccacttttagctgtctctaaaaaagaaataaaacaattccaagagagatatcatataccatattttgaagatgaatctaataaagataacaaatatgttagaaatgatattcgtaatagaattattccagctattgatgaaaataatcaacttaaagtatcgcatttattaaaattaaaacaatggcatgatgaacaatatgatattttgcaatattcagctaaacaatttattcaagaatttgtgaagtttgatgaacagtcaaaatatttagaggtttctagacaatcttttaataacttgccaaactcattaaagatggttgtgttggattgcctattatcaaagtattatgagttgtttaatattagtgctaaaacatacgaagagtggtttaaacaatttagtagtaagaaagcacaattcagtattaatctcacggataaatggataattcaaatcgcatatggtaaattaataataatggctaaaaataatggcgatacatattttagagttcaaactattgaaaagccaggtaattatatttttaacaaatatcgattagagatacattctaatttaccaaaatgtttatttccgcttacagtgagaacacgacaaagtggcgatacatttaaactgaatgggcgcgatggttataagaaagtgaatcgtctgtttatagattgtaaagtacaacagtgggttcgggatcaaatgccaatcgtattggataaacaacagcgcattattgcggtaggagatttatatcaacaacaaacaataaaacaatggattataattagtaaaaatggagatgaatagcgttatgcataatgatttgaaagaagtattgttaactgaagaagatattcaaaatatctgtaaggaattgggagaacaattaacaaaggattatcaaggtaaaccattagtatgcgtgggtatcttaaaaggctcagcaatgtttatgtcagatttaattaaacgaattgatacccatttatcaattgatttcatggatgtttctagttatcacggaggcactgagtcaactggtgaagttcaaatcattaaagatttaggttcttctattgaaaataaagacgtattaattattgaagatatcttagagactggtactacacttaagtcaattactgaattattacaatctagaaaagttaattcattagaaatagttactttattagataaaccaaaccgtcgtaaagcggacattgaagctaagtatgtaggtaaaaaaataccagatgaatttgttgttggttacggtttagattatcgtgaattataccgaaacttaccatatatcggtacgttaaaacctgaagtgtattcaaattaattttttaatcaatttcagttattattactatgcgtttgagaaataatagtgtagactcaaaaatatgaaaaatgtatttcatatatatttaattttagacaagacatatgtcttaaaaagttgaaaaatatagagattgataaaactaacacagggtgtgaatgacattgatgttaagctcaattactagcttataaaacatgtcatatgttacaatttttgttagttttattatgggaagtaggaggaaatgacgcatgcagaaagcttttcgcaatgtgctagttatcgtaataataggcgttattatttttggtctattttcatatttaaacggtaatggaaatatgccgaaacagcttacatataatcaatttactgagaagttggaaaaaggtgaccttaaaactttagaaatccaaccacaacaaaatgtctatatggtaagtggtaaaacgaaaaatgatgaagactattcatcaactattttatataacaacgaaaaagaattacaaaaaattactgatgctgctaaaaagcaaaacggtgtaaaattaacgattaaagaagaagaaaaacaaagtgtctttgtgagtatactttcaacattaattccagttgtagtcatagcgttattatttattttcttcctaagccaagcacaaggtggcggtagtggcggtcgtatgatgaactttggtaaatctaaagcaaaaatgtacgataataataaacgtcgtgttcgtttctctgatgtagcaggggcagatgaagaaaaacaagaattaattgaaattgttgatttcttgaaagataataaaaaattcaaagaaatgggatctaggattcctaaaggtgtcttacttgttggacctccaggtactggtaaaacattacttgctagagcggttgcaggtgaagcaggcgcaccattcttctctattagtggttcagactttgtagagatgtttgttggtgttggtgcgagccgtgttcgtgacttattcgataatgctaagaaaaacgcgccttgtatcatctttatcgatgagattgatgctgttggtcgtcaacgtggtgcaggtgttggtggcggtcatgatgaacgtgaacaaaccctaaaccaattattagttgaaatggatggattcggtgaaaatgaaggaatcattatgatagctgctacaaaccgtcctgatatccttgacccagccttattacgtccaggtcgttttgatagacaaattcaagttggtcgtccagatgtgaaaggccgtgaagcaattcttcatgttcatgctaaaaataaaccacttgatgaaacggttgatttaaaagcaatttcacaacgtacacctggtttctcaggtgctgatttagagaacttattaaatgaagcatctttaattgctgtacgtgaaggtaaaaagaaaattgacatgagagatatcgaagaggcaacggatagagttatagccggacctgctaagaaatctcgagttatttctaagaaagaacgtaatattgttgctcatcacgaagctggtcatacaattatcggtatggtacttgatgaggcagaagtagtgcataaagttactatcgttccacgtggacaagctggtggttatgcaatgatgctacctaaacaagatcgtttcttaatgactgaacaagagttattagataaaatctgtggtttacttggtggacgtgtatcagaagatattaactttaacgaagtatcaacaggtgcttcaaatgacttcgaacgtgcaacacaaatcgcacgctcaatggttacgcaatatggtatgagtaaaaaattaggaccattacagttcggtcatagcaatggtcaagtattcttaggtaaagatatgcaaggtgagcctaattattcaagccaaatcgcatatgaaattgataaagaagttcaacgaatcgttaaagaacaatacgaacgttgtaaacaaattttattagagcacaaagaacaattaattttaattgctgaaacattattaacagaagaaacattagttgctgaacaaattcaatcattattctacgaaggtaaattacctgaaattgattatgatgcagctaaagttgttaaagatgaagattctgaatttaatgatggtaaattcggtaaatcttatgaagagattcgtaaagagcaattagaagatggacaacgtgacgaaagtgaagatcgtaaagaagaaaaagatattgctgaggataaaaaagaagctgataaatctgatgaaaaagatgaaccagcacatcgacaagccccaaatatcgaaaaaccttacgatccaaatcacccagacaataaataatcgattatattcagtacctctttctatgataaagttatagaaagaggtacttttatgatttaaggaatacacgattacttactaagtaatggtattatggcacgaataattaataatcaaacaagttgcttcattatttagaatgatgggtgtagaataagtacaattgttgcattttatgaagtaaagtaatttttaaaatatagagtaatagaggagattgaaataatgacacacgattatattgttaaagcattagcatttgatggggagattagggcttatgctgctttgacaactgaaactgttcaagaagcacaaacgagacattatacatggccgacagcatctgctgcaatgggaagaacaatgacagcaacagctatgatgggcgcaatgttgaaaggtgatcaaaaattaacagtcactgtagatggccaaggacctattggacgaattattgccgatgcaaatgctaaaggcgaggtgcgtgcttatgtagaccatccacaaactcattttccattaaatgagcaaggtaaacttgatgtaagacgagcagtagggacaaatggatctattatggttgttaaagacgttggaatgaaagactatttctctggagcaagtccaattgtttcaggagaacttggtgaagattttacttattattatgctacaagtgaacaaacaccttcatcggtaggtcttggtgtattggtaaatcctgataatacgattaaagcagcaggaggatttatcattcaagttatgccaggtgccaaagatgaaacaatttcaaaattagaaaaagcaattagtgcaatgacaccagtttctaaattaattgaacaaggattaacgccagaaggattactaaacgaaatcttaggtgaagaccatgtgcaaattttagagaaaatgcctgttcaatttgaatgtaattgtagtcatgagaaatttttaaatgctattaaaggattgggcgaggctgagattcaaaatatgattaaagaagatcatggtgctgaagcagtatgtcatttctgtggaaataaatataaatatactgaagaagaattaaacgtgttgctagaaagtttagcgtaatttaatttaaatcaatacgctaaaatgtttatttttagcggtttagtgaaatgtagaactaaatagttgtataatccttagtaattttgtttgctttctagaatttatttgataaaataattctatatccgataaataaactaagatttcaacaactaactaaaaaggagtgttcttaatggcacaaaaaccagtagataatattactcaaattattggcggtacaccggtagtcaaattgagaaatgtagtagatgacaatgcagcagatgtttatgtaaaattggaatatcaaaatccaggtggttctgtaaaggatagaattgctttagcaatgattgaaaaagcagagcgagaaggcaaaattaaacctggcgatacaattgtagaaccaactagtggtaatacgggtatcggtttagcatttgtatgtgctgctaaaggatataaagcagtatttactatgcctgaaacaatgagccaagagcgtcgtaatttattaaaagcatacggtgcggaattagttttaacgcctggatcagaagcgatgaaaggtgcaattaaaaaagctaaagaattaaaagaagaacatggttacttcgagccacaacaatttgaaaaccctgcgaaccctgaagttcatgagttaactacaggtcctgagttattacaacaatttgaagggaaaactatcgatgcgttcctagctggtgttggtactggcggtacgttatctggtgtaggtaaagttctgaaaaaagaatatcctaacatcgaaattgttgctatagagcctgaggcttctccagtattgagcggtggtgagccaggtccacataaattacaaggtttaggtgctggatttattccaggtactttgaatacagaaatctatgacagtattattaaagtaggaaatgatacagcgatggaaatgtctcgtcgagttgctaaagaggaaggtattttagcaggtatttcatcaggtgctgcgatttatgctgccattcaaaaagcaaaagaattaggaaaaggtaaaacagtagtaacagtattgccgagtaatggtgaacgctacttatcaacacctttatattcattcgatgactaattaacgtcatttaaaagagtgagttatctttttgagataacttgctctttttttctaccatgtataattttaaaaatatgagcgttaaatcaaacatttttctgataaaaacatccagtgaatgataagataataaacgtatatactaataactagtaaatcgcagaagtaaattttattagagttaaataatacataattaaagggtggttaacatgactaaaacaaaaattatgggcatattaaacgtcacacctgattcattctcagatggtggaaaatttaataatgttgaatcagcagtaactagagtgaaagcgatgatggatgaaggtgctgacattatagatgttggaggtgtttcaacgagacccggccatgaaatgattactgtggaagaagagttgaatagagtattaccagttgttgaagcgattgtcggttttgatgtaaaaatttcggttgatacttttcgtagtgaagttgctgaagcttgtttaaagctaggtgttgatattattaatgatcaatgggcaggcctttatgatcatcgcatgtttcaagttgtagccaaatacgatgcggaaattgttttaatgcataatggcaatggtaatcgtgatgaaccggttgtcgaagaaatgttaacatctttgttagcacaagcacatcaggctaaaatagctggtataccttcaaataaaatttggctagatccaggtataggtttcgctaaaactagaaatgaagaagccgaaattatggcaagactggatgaacttgttgcaacagaatatccagttttattagcgacaagccggaaacgtttcactaaagagatgatgggttatgatacaacaccggttgaaagagatgaagtaactgcagctacgactgcatatggtattatgaaaggcgttagagcagtacgcgttcataatgtcgagttgaatgctaaattagctaaaggtatagattttttaaaggagaatgaaaatgcaagacacaatctttcttaaaggtatgcgcttttatggatatcatggtgctttatcagctgaaaatgaaataggacaaattttcaaagtggatgtaactttgaaagtagacttagctgaagctggtcgtactgataatgttattgatacagttcattatggtgaagtgttcgaagaggttaaatcaattatggaaggtaaggccgttaatttacttgaacatctagctgaacgtattgcaaatcgtataaattcacaatataatcttgtaatggaaacgaaagtgagaatcactaaagaaaacccaccgattccgggtcattatgatggagtaggtatcgaaattgtgagggagaataaatgattcaagcatacttaggattaggtagtaatattggtgatagagaaagccagttaaacgatgctataaagattttgaatgaatatgatggtattaacgtatctaatatttctccgatttatgaaacagcaccagttgggtatactgagcaacctaactttttaaatttgtgtgttgaaattcaaacaacactcacagtattacaactgttggaatgttgtttgaagacagaagaatgtttacaccgtgttagaaaggaacgatggggtcctagaactttagatgtggatattttgttgtatggagaagaaatgatagatttgccaaaactgtcggtgccacatccgagaatgaatgaacgtgcatttgttttaatcccattaaatgatatagcagcaaatgtcatagaaccacgttcgaaattgaaagtgaaagatttagtttttgtcgatgacagtgtaaagagatataaataatgtattgttgagaacattcataatttattgggaatagatgattgattattggagatgtttccgcattttgattatctctaaatgcatttgatttcgaattagtatatgatgatttagtatgtgttagaattaagttatttcataaaatcaaagtaagcaatatttgatgaattgctgtaatttatttgggcttttgttggagtttgtggaagataatttttatacatttacttagggttgtattaatgataatcgtattttaaatgaataagtaattcataaacgaaaacagaaattgctttattacatttacaacctcttgtaaaattaaaaaagtgataaaattgatgttatgaatataagaaaacatgccacatcataactttaaggtgcaatggataatgataaagtattagaaacatcgaaagagatgtatgttgagcaaaaatgtctgatattttataaaactttaaaggaatatgtttgagtgtaccagttggaatactaaaggattacaacaagttaaaggagagaaagttatgtcagaagaaatgaatgaccaaatgttggttcgacgtcaaaaattacaagaattatatgatcttggtatagacccgtttggttctaaatttgaccgttcaggtttatctagtgatttgaaagaagagtgggaccagtattctaaagaagaattggtagaaaaagaagcggatagtcatgtcgctatagctggacgattaatgactaagcgtggtaaaggtaaagcaggatttgcacacgttcaggacttagctggacaaattcaaatatacgttcgtaaagatcaagttggcgatgacgaatttgatttatggaaaaatgctgatttaggcgatatcgttggtgttgaaggtgtaatgttcaaaacaaatactggcgaattatcggttaaagcgaagaaattcacgctactaactaaatcattgcgaccattaccggataaattccacggtttacaggatatcgaacagagatatcgtcaaagatatttagatttaattacgaacgaagatagcactcgtacatttattaatcgtagtaaaatcattcaagaaatgcgtaattatttaaataataaaggtttcttggaagtagaaacacctatgatgcaccaaattgctggtggcgcagctgctagaccatttgtaacacatcataatgcattagatgcaacgttatacatgcgtattgctattgagttgcatttaaaacgtttaattgtcggtggacttgaaaaagtatatgaaattggtagagtattccgtaatgaaggtgtatcaactagacataatcctgaattcacaatgattgaattatatgaagcatatgcagattatcatgacattatggatttaacagaatctatggtgagacatattgccaatgaagtattaggttctgcaaaagtacaatacaatggggaaacgattgatttagaatctgcttggactcgtttgcatattgttgatgctgtaaaagaagctactggtgtagatttttatgaagttaaaagtgatgaagaagctaaagctttagctaaggaacatggtattgaaattaaagatacaatgaaatatggtcatattttaaatgaattctttgagcaaaaagttgaagaaacacttattcagccaacgtttatctatggtcatccgactgaaatttcacctttagcgaagaaaaatcctgaagatcctagatttactgatcgtttcgaattgttcattgtaggtagagagcatgcaaatgcatttactgaattaaatgatcctattgatcaaaaaggtcgctttgaagcgcaacttgttgaaaaagcgcaaggtaatgatgaagcgcatgaaatggatgaagattacattgaagcgttagaatatggcatgcctccgacaggtggtcttggtatcggtattgacagattagttatgttattaactgactctccatcgatcagagacgtattattattcccttatatgagacaaaaataaatgacgttgattgttagtaagagctctcgtgtatacaacatgtgtatgcgagggttttcttaattatggtaattagttcgtgtttgaatgtttttgatagtaatagttaacgataatggtgctatttttgactgttaaacaaggtagttagctgttagatgaaaatgacgatacgtatatatattagttctgatgagaaatgttaatgatagacattgagatatcttataacaaaaattgctatattagtataatttatcttaatcagctataaaagtactttaaaattgtatagaatgtgtatggttttgtacatatgtgtatgatagaatactaaaagtgttatgaattagagagcacgagaaatgtgagttttgaagaataaaaaagttgattaaaagtgttgactttatcaattgaatgaagtaatatataaaagtcgtcaaaaacagacgaaacacactaaaagctgatgtgacaaagttcacaacaaagtgtaaaattaactattgcaccttattaattaagcgtgtatcataaataagtaagttattttgtctggtgactatagcaaggaggtcacacctgttcccatgccgaacacagaagttaagctccttagcgtcgatggtagtcgaacttacgttccgctagagtagaacgttgccaggcaaatgacaaatcggagaattagctcagctgggagagcatctgccttacaagcagagggtcggcggttcgaacccgtcattctccaccatttattcttacatatagccggcctagctcaattggtagagcaactgacttgtaatcagtaggttgggggttcaagtcctctggccggcaccatcttttgagccattagctcagctggtagagcatctgacttttaatcagagggtcagaggttcgaatcctctatggctcattacgatttaatttttatatttagcaaaataatgcagaagtagttcagcggtagaatacaaccttgccaaggttggggtcgcgggttcgaatcccgtcttctgctccattattttgccggggtggcggaactggcagacgcacaggacttaaaatcctgcggtgagagatcaccgtaccggttcgattccggtcctcggcaccattttagcgcccgtagctcaattggatagagcgtttgactacggatcaagaggttatgggttcgactcctatcgggcgcgccatttttaaattaattgaataacgggaagtagctcagcttggtagagcacttggtttgggaccaaggggtcgcaggttcgaatcctgtcttcccgattacttcttaaattccattttatgggggcttagctcagctgggagagcgcctgctttgcacgcaggaggtcagcggttcgatcccgctagtctccaccatttatttttacacgatgaacattgaaaactgaatgacaatatgtcaacgttaattccaaaaaacgtaactataagttacaaacattatttagtatttatgagctaatcaaacatcataatttttatggagagtttgatcctggctcaggatgaacgctggcggcgtgcctaatacatgcaagtcgagcgaacggacgagaagcttgcttctctgatgttagcggcggacgggtgagtaacacgtggataacctacctataagactgggataacttcgggaaaccggagctaataccggataatattttgaaccgcatggttcaaaagtgaaagacggtcttgctgtcacttatagatggatccgcgctgcattagctagttggtaaggtaacggcttaccaaggcaacgatgcatagccgacctgagagggtgatcggccacactggaactgagacacggtccagactcctacgggaggcagcagtagggaatcttccgcaatgggcgaaagcctgacggagcaacgccgcgtgagtgatgaaggtcttcggatcgtaaaactctgttattaggaagaacatatgtgtaagtaactgtgcacatcttgacggtacctaatcagaaagccacggctaactacgtgccagcagccgcggtaatacgtggcaagcgttatccggaattattgggcgtaaagcgcgcgtaggcgggtttttaagtctgatgtgaaagcccacggctcaaccgtggagggtcattggaaactggaaaacttgagtgcagaagaggaaagtggaattccatgtgtagcggtgaaatgcgcagagatatggaggaacaccagtggcgaaggcgactttctggtctgtaactgacgctgatgtgcgaaagcgtggggatcaaacaggattagataccctggtagtccacgccgtaaacgatgagtgctaagtgttagggggtttccgccccttagtgctgcagctaacgcattaagcactccgcctggggagtacgaccgcaaggttgaaactcaaaggaattgacggggacccgcacaagcggtggagcatgtggtttaattcgaagcaacgcgaagaaccttaccaaatcttgacatcctttgacaactctagagatagagccttccccttcgggggacaaagtgacaggtggtgcatggttgtcgtcagctcgtgtcgtgagatgttgggttaagtcccgcaacgagcgcaacccttaagcttagttgccatcattaagttgggcactctaagttgactgccggtgacaaaccggaggaaggtggggatgacgtcaaatcatcatgccccttatgatttgggctacacacgtgctacaatggacaatacaaagggcagcgaaaccgcgaggtcaagcaaatcccataaagttgttctcagttcggattgtagtctgcaactcgactacatgaagctggaatcgctagtaatcgtagatcagcatgctacggtgaatacgttcccgggtcttgtacacaccgcccgtcacaccacgagagtttgtaacacccgaagccggtggagtaaccttttaggagctagccgtcgaaggtgggacaaatgattggggtgaagtcgtaacaaggtagccgtatcggaaggtgcggctggatcacctcctttctaaggatatattcggaacatcttcttcagaagatgcggaataatgtgacatattgtattcagttttgaatgtttatttaacattcaaaaaaatgggcctatagctcagctggttagagcgcacgcctgataagcgtgaggtcggtggttcgagtccacttaggcccaccattatttgtacattgaaaactagataagtaagtaaaatatagattttaccaagcaaaaccgagtgaataaagagttttaaataagcttgaattcataagaaataatcgctagtgttcgaaagaacactcacaagattaataacgcgtttcctgtaggatggaaacatagattaagttattaagggcgcacggtggatgccttggcactagaagccgatgaaggacgttactaacgacgatatgctttggggagctgtaagtaagctttgatccagagatttccgaatggggaaacccagcatgagttatgtcatgttatcgatatgtgaatacatagcatatcagaaggcacacccggagaactgaaacatcttagtacccggaggaagagaaagaaaattcgattcccttagtagcggcgagcgaaacgggaagagcccaaaccaacaagcttgcttgttggggttgtaggacactctatacggagttacaaaggacgacattagacgaatcatctggaaagatgaatcaaagaaggtaataatcctgtagtcgaaaatgttgtctctcttgagtggatcctgagtacgacggagcacgtgaaattccgtcggaatctgggaggaccatctcctaaggctaaatactctctagtgaccgatagtgaaccagtaccgtgagggaaaggtgaaaagcaccccggaaggggagtgaaatagaacctgaaaccgtgtgcttacaagtagtcagagcccgttaatgggtgatggcgtgccttttgtagaatgaaccggcgagttacgatttgatgcaaggttaagcagtaaatgtggagccgtagcgaaagcgagtctgaatagggcgtttagtatttggtcgtagacccgaaaccaggtgatctacccttggtcaggttgaagttcaggtaacactgaatggaggaccgaaccgacttacgttgaaaagtgagcggatgaactgagggtagcggagaaattccaatcgaacctggagatagctggttctctccgaaatagctttagggctagcctcaagtgatgattattggaggtagagcactgtttggacgaggggcccctctcgggttaccgaattcagacaaactccgaatgccaattaatttaacttgggagtcagaacatgggtgataaggtccgtgttcgaaagggaaacagcccagaccaccagctaaggtcccaaaatatatgttaagtggaaaaggatgtggcgttgcccagacaactaggatgttggcttagaagcagccatcatttaaagagtgcgtaatagctcactagtcgagtgacactgcgccgaaaatgtaccggggctaaacatattaccgaagctgtggattgtcctttggacaatggtaggagagcgttctaagggcgttgaagcatgatcgtaaggacatgtggagcgcttagaagtgagaatgccggtgtgagtagcgaaagacgggtgagaatcccgtccaccgattgactaaggtttccagaggaaggctcgtccgctctgggttagtcgggtcctaagctgaggccgacaggcgtaggcgatggataacaggttgatattcctgtaccacctataatcgttttaatcgatggggggacgcagtaggataggcgaagcgtgcgattggattgcacgtctaagcagtaaggctgagtattaggcaaatccggtactcgttaaggctgagctgtgatggggagaagacattgtgtcttcgagtcgttgatttcacactgccgagaaaagcctctagatagaaaataggtgcccgtaccgcaaaccgacacaggtagtcaagatgagaattctaaggtgagcgagcgaactctcgttaaggaactcggcaaaatgaccccgtaacttcgggagaaggggtgctctttagggttaacgcccagaagagccgcagtgaataggcccaagcgactgtttatcaaaaacacaggtctctgctaaaccgtaaggtgatgtataggggctgacgcctgcccggtgctggaaggttaagaggagtggttagcttctgcgaagctacgaatcgaagccccagtaaacggcggccgtaactataacggtcctaaggtagcgaaattccttgtcgggtaagttccgacccgcacgaaaggcgtaacgatttgggcactgtctcaacgagagactcggtgaaatcatagtacctgtgaagatgcaggttacccgcgacaggacggaaagaccccgtggagctttactgtagcctgatattgaaattcggcacagcttgtacaggataggtaggagcctttgaaacgtgagcgctagcttacgtggaggcgctggtgggatactaccctagctgtgttggctttctaacccgcaccacttatcgtggtgggagacagtgtcaggcgggcagtttgactggggcggtcgcctcctaaaaggtaacggaggcgctcaaaggttccctcagaatggttggaaatcattcatagagtgtaaaggcataagggagcttgactgcgagacctacaagtcgagcagggtcgaaagacggacttagtgatccggtggttccgcatggaagggccatcgctcaacggataaaagctaccccggggataacaggcttatctcccccaagagttcacatcgacggggaggtttggcacctcgatgtcggctcatcgcatcctggggctgtagtcggtcccaagggttgggctgttcgcccattaaagcggtacgcgagctgggttcagaacgtcgtgagacagttcggtccctatccgtcgtgggcgtaggaaatttgagaggagctgtccttagtacgagaggaccgggatggacatacctctggtgtaccagttgtcgtgccaacggcatagctgggtagctatgtgtggacgggataagtgctgaaagcatctaagcatgaagcccccctcaagatgagatttcccaacttcggttataagatccctcaaagatgatgaggttaataggttcgaggtggaagcatggtgacatgtggagctgacgaatactaatcgatcgaagacttaatcaaaataaatgttttgcgaagcaaaatcacttttacttactatctagttttgaatgtataaattacattcatatgtctggtgactatagcaaggaggtcacacctgttcccatgccgaacacagaagttaagctccttagcgtcgatggtagtcgaacttacgttccgctagagtagaacgttgccaggcagttttttaatcaaattttggttaaaaaataaaatggacaagataaaaaaagttattgacttaaatgttaataaaatgtataattaattcttgtcggtaagaaaaatgaacattgaaaactgaatgacaatatgtcaacgttaattccaaaaaacgtaactataagttacaaacattatttagtatttatgagctaatcaaacatcataatttttatggagagtttgatcctggctcaggatgaacgctggcggcgtgcctaatacatgcaagtcgagcgaacggacgagaagcttgcttctctgatgttagcggcggacgggtgagtaacacgtggataacctacctataagactgggataacttcgggaaaccggagctaataccggataatattttgaaccgcatggttcaaaagtgaaagacggtcttgctgtcacttatagatggatccgcgctgcattagctagttggtaaggtaacggcttaccaaggcaacgatgcatagccgacctgagagggtgatcggccacactggaactgagacacggtccagactcctacgggaggcagcagtagggaatcttccgcaatgggcgaaagcctgacggagcaacgccgcgtgagtgatgaaggtcttcggatcgtaaaactctgttattagggaagaacatatgtgtaagtaactgtgcacatcttgacggtacctaatcagaaagccacggctaactacgtgccagcagccgcggtaatacgtaggtggcaagcgttatccggaattattgggcgtaaagcgcgcgtaggcggttttttaagtctgatgtgaaagcccacggctcaaccgtggagggtcattggaaactggaaaacttgagtgcagaagaggaaagtggaattccatgtgtagcggtgaaatgcgcagagatatggaggaacaccagtggcgaaggcgactttctggtctgtaactgacgctgatgtgcgaaagcgtggggatcaaacaggattagataccctggtagtccacgccgtaaacgatgagtgctaagtgttagggggtttccgccccttagtgctgcagctaacgcattaagcactccgcctggggagtacgaccgcaaggttgaaactcaaaggaattgacggggacccgcacaagcggtggagcatgtggtttaattcgaagcaacgcgaagaaccttaccaaatcttgacatcctttgacaactctagagatagagccttccccttcgggggacaaagtgacaggtggtgcatggttgtcgtcagctcgtgtcgtgagatgttgggttaagtcccgcaacgagcgcaacccttaagcttagttgccatcattaagttgggcactctaagttgactgccggtgacaaaccggaggaaggtggggatgacgtcaaatcatcatgccccttatgatttgggctacacacgtgctacaatggacaatacaaagggcagcgaaaccgcgaggtcaagcaaatcccataaagttgttctcagttcggattgtagtctgcaactcgactacatgaagctggaatcgctagtaatcgtagatcagcatgctacggtgaatacgttcccgggtcttgtacacaccgcccgtcacaccacgagagtttgtaacacccgaagccggtggagtaaccttttaggagctagccgtcgaaggtgggacaaatgattggggtgaagtcgtaacaaggtagccgtatcggaaggtgcggctggatcacctcctttctaaggatatattcggaacatcttcttcagaagatgcggaataatgtgacatattgtattcagttttgaatgtttatttaacattcaaatattttttggttaaagtgatattgcttatgcgagcgcttgactaaaaagaaattgtacattgaaaactagataagtaagtaaaatatagattttaccaagcaaaaccgagtgaataaagagttttaaataagcttgaattcataagaaataatcgctagtgttcgaaagaacactcacaagattaataacgcgtttcctgtaggatggaaacatagattaagttattaagggcgcacggtggatgccttggcactagaagccgatgaaggacgttactaacgacgatatgctttggggagctgtaagtaagctttgatccagagatttccgaatggggaaacccagcatgagttatgtcatgttatcgatatgtgaatacatagcatatcagaaggcacacccggagaactgaaacatcttagtacccggaggaagagaaagaaaattcgattcccttagtagcggcgagcgaaatgggaagagcccaaaccaacaagcttgcttgttggggttgtaggacactctatacggagttacaaaggacgacattagacgaatcatctggaaagatgaatcaaagaaggtaataatcctgtagtcgaaaatgttgtctctcttgagtggatcctgagtacgacggagcacgtgaaattccgtcggaatctgggaggaccatctcctaaggctaaatactctctagtgaccgatagtgaaccagtaccgtgagggaaaggtgaaaagcaccccggaaggggagtgaaatagaacctgaaaccgtgtgcttacaagtagtcagagcccgttaatgggtgatggcgtgccttttgtagaatgaaccggcgagttacgatttgatgcaaggttaagcagtaaatgtggagccgtagcgaaagcgagtctgaatagggcgtttagtatttggtcgtagacccgaaaccaggtgatctacccttggtcaggttgaagttcaggtaacactgaatggaggaccgaaccgacttacgttgaaaagtgagcggatgaactgagggtagcggagaaattccaatcgaacctggagatagctggttctctccgaaatagctttagggctagcctcaagtgatgattattggaggtagagcactgtttggacgaggggcccctctcgggttaccgaattcagacaaactccgaatgccaattaatttaacttgggagtcagaacatgggtgataaggtccgtgttcgaaagggaaacagcccagaccaccagctaaggtcccaaaatatatgttaagtggaaaaggatgtggcgttgcccagacaactaggatgttggcttagaagcagccatcatttaaagagtgcgtaatagctcactagtcgagtgacactgcgccgaaaatgtaccggggctaaacatattaccgaagctgtggattgtcctttggacaatggtaggagagcgttctaagggcgttgaagcatgatcgtaaggacatgtggagcgcttagaagtgagaatgccggtgtgagtagcgaaagacgggtgagaatcccgtccaccgattgactaaggtttccagaggaaggctcgtccgctctgggttagtcgggtcctaagctgaggccgacaggcgtaggcgatggataacaggttgatattcctgtaccacctattttggaaatgataatttaataatgtgcattttcgattgtctaaatctgtgactagaagtataagtgaagacattcagaagtattataaaaagtgaacagcagtaagatagtttttaatcataaatcatcttactgctgtttttaggttttatgtttaatatcttttaaatcgaaatacaaaaaggaaattaattattatacaatagacaagctattgcataagtaacactaacttttgtcaaagaagtgttactttataattaatgattttattagagcgtctacatgcggttttaaagcatcatcgtctataccgccaaagcctaatataaatttaggggttttcttatagtcttggtcatcatcaaaattataaacttgtaattttaactttactttatttgctctatcaagacactcttgtaatgttaatccattttttattgtaattgtaaaatgcatacctgtttcagcaccttgaatatcaagttgctctttgtatggttttaatctttttaaaatataggttagttttctacgataaattcgtctcattttatttaaatgcctttcaaaaccaccggaagatataaacgttgcaataaggttttgcatatgaacaggtacagtgttgccttcaatgtgattttgagaatgatattttttcattatagaatagggtaacaccatatatgcaacacgacagctaggaaaaatagactttgaaaatgtactgatataaatcactttttctcctcttgaatatagaccttgaattgctggaatgggtttaccgaaatatctaaactcggaatcataatcatcttctataataaatcgttcttctttttcttgagcccattgtattaattgagttcgcttttttaagtccattacatatccagttggaaattgatgggaaggcgttatataaactatatttttttgtgatttaataacttcatctacgtttattccattatcttcaacttcaatttgttcatattcaacttgttttttatctaaaatatttttgattggtggataactaggtttttcgataataaacgttgaagtataaagtaaatcgactaattgatttactaattgttcggtagatgagccaattataatttgattaggatcacaaattacaccacgattggtaaataaataaaatgccagttgaaatcttaaatgtaattctccttgaaaatgtcctctacgtagttgatttaaatgatttgtatcataaagatctttggaatactttctgaaaagttctatagggaaatgtttcgtatctatttcatccaaattaaaagcataatcataagattcatcactcgcttttggattatatgaatcatcatcaaaaagagaagggataggttgattgtttaaaattgttaaagattcaatttcggacacaaaatatccagagcgaggtcttgaataaatgtaaccttcgtctaatagaagttgatatgcatgctctacggttgtttggctgatagataaatgtttgcttaattgtcttttagaataaaatttatcgccttctttaaattgaccttcaattatttgtttttttaatttttcataaagttgatggtataaagtgtttttcaattttataactgacctcctaaatttatcttattttgtacctttttaaatatcagtttatacattacaatgtatttaatcaacttgaaaaggggttttatgtataatgagtaaaattattggatcagacagagtcaaaagaggtatggctgaaatgcaaaaaggcggcgttattatggatgtcgttaatgctgagcaagcaagaattgcagaagaagctggcgcggtagcagttatggcattagaacgagtaccttctgatattagagctgctggtggcgttgcacgtatggcaaaccctaaaattgtagaagaagtaatgaatgctgtttctattccagtcatggctaaagcacgtattggtcatatcactgaagcaagagtattagaggcgatgggtgttgactatattgatgaatcagaagtgttaacaccagcagatgaggaatatcacttaagaaaagatcaatttacagtaccatttgtatgtggatgtcgtaatttaggtgaagctgcgcgtagaattggtgaaggtgctgctatgttacgtactaaaggtgaaccaggtacaggtaatattgttgaagctgtaagacatatgagacaagttaattcagaagttagtcgattgactgtaatgaatgatgatgagattatgactttcgcgaaagatatcggtgcgccttatgaaattttaaaacaaattaaagacaatggtcgtttaccggtagttaactttgcagctggtggtgttgcgactcctcaagatgctgctttaatgatggaattaggtgccgatggtgtattcgttggatcaggtatttttaaatcagaagatccagaaaaatttgctaaagcaattgttcaagcaacaacacattaccaagactatgaactaattggaagattagcaagtgaacttggcactgctatgaaaggtttagatatcaatcaattatcattagaagaacgtatgcaagagcgtggttggtaagatatgaaaataggtgtattagcattacaaggtgcagtacgtgaacatattagacatattgaactaagtggtcatgaaggtattgcagttaaaaaagttgaacaattagaagaaatcgagggcttaatattacctggtggcgagtctacaacgttacgtcgattaatgaatttatatggatttaaagaggctttacaaaattcaactttacctatgtttggtacatgcgcaggattaatagttctagcgcaagatatagttggtgaagaaggataccttaacaagttgaatattactgtacaacgaaactcattcggtagacaagttgacagctttgaaacagaattagatattaaaggtatcgctacagatattgaaggtgtctttataagagcgccacatattgaaaaagtaggtcaaggcgtagatatcctatgtaaggttaatgagaaaattgtagctgtccagcaaggtaaatatttaggcgtatcattccatcctgaattaacagatgactatagagtaacggattactttattaatcatattgtaaaaaaagcatagcttaatgtatgctaaatcaacgaattattgatatttatagatttgttgagaagacaatatctccttcaaacttagctttggaggagttattttttatgtcaaaattaaaaatgataaaaaataagatatacataagaaaaaacccttcaaagagactgagaatagtcaaaattttgaaggggttaattcgatgttgatgtatttgttaaataaagaatccagcgattgcagctgaaatgaatgatactagtgttgcaccgaataatagtttcaaaccaaagcgggcaactgtatctccttttttgtcattaagtgatttaatcgcacctgaaataataccaatagagctaaagttagcaaatgatactaagaatacagatgtaacaccttttgcgtgttcagataaatcactaagtttaccaagtgcttgcattgctacaaattcgttagataatagttttgtcgccataactgaaccggcttgaactgcatcctgccatggcacaccgactaagaatgcaaatggtgcaaagacaaaaccaattaatgtttggaaatcccaagaaatagcgccacctgaaactgtactaaagatactgcttacaattccatttaatagagcgataatggcaatgtatccgattaacattgcgcctacaatgacagctactttaaatccatctaaaatatattctcctagcatttcgaagaatgattgttgtctttcttcagtttcttcaactaataatttgtcatcttcttcattaactttataagggttaataattgaagcgatgatgaaaccaccaaataagtttaagacaacagccgttacaacatatttaggttcaattaaggtaaagtatgcaccgataattgaagcagaaacagtcgacattgctgaagctgttaatgtgtataaacgttgcttaggtatgtatggtaattgttttttaattgaaataaatacttcagactgtcccaaaattgctgcagcaactgcattgtatgattctaaacgtcccataccattaattttagaaattaagaatcctaaaacattaatgattaaaggtaaaatctttgtgtattgaaggataccgataatcgctgaaataaatacgataggtaataatacactgaagaagaatggtggttgcttaggatcgatatattgaataccaccgaatacaaagttaacaccatctgcagcttttaataataagtagttaaaaccgttcgaaataccaccaataaccttgattcccattgtagttttaagcaagataaatgcaaagataagctgaattgcaagtaaaattcctacatatttccagcgaatatttttcctgtctgagctaaatagaaacgcaagtgctaaaaagaagataattccgataatcccaattagaatatgcatatatttctcattcctttagttttttctacaatctatcatacaataaaatggaagggctaacatcataaatttttgaaaatataaaaacaaattaattgaaaaaggtcaaaataggtcatataatatagtcaaagaaggtcaaaaaggggtgatatacatgcacaatatgtctgacatcatagaacaatacatcaaacgtttatttgaagagtcgaatgaggatgtcgttgaaattcagagagcgaatatcgcacagcgttttgattgcgtaccatcacagttaaactatgtaatcaaaacacgattcactaatgaacatggttatgaaatcgaaagtaaacgtggtggtggtggttacatccgaatcactaaaattgaaaataaagatgcaacaggttatattaatcatttgcttcagctgattggaccttctatttctcaacaacaagcttattatattattgatgggcttttagataaaatgttaataaatgaacgtgaagctaaaatgattcaagcagttattgatagagaaacgctatcaatggatatggtttctagagatattattagagcaaatattttaaaacgtttgttaccagttataaattattactaaatgaaatgaggtgttgaagtgctttgtgaaaattgtcaacttaatgaagcggaattaaaagttaaagttacaagtaaaaataaaacagaagaaaaaatggtgtgtcaaacttgtgctgaggggcaccatccgtggaatcaagctaatgaacaacctgaatatcaagaacatcaagataatttcgaagaagcatttgttgttaagcaaattttacaacatttagctacgaaacatggcatcaattttcaagaagtagcgtttaaagaagaaaaacgttgcccatcatgtcacatgactttgaaagatattgcacatgttggtaaatttgggtgtgctaattgttatgcaacatttaaagatgacatcattgatatcgtccgcagagttcaaggtggacaatttgagcacgttggaaagacaccacattcttcacataaaaagatagctttaaagcgaaaaatcgaagaaaagaatgaatatttgaaaaaacttgttgaaatccaagattttgaggaagcagccattgttagagatgaaattaaagcactaaaagctgagagtgaggtgcaacatgatgacgcataatattcatgataatatcagccaatggatgaaaagtaatgaagaaacaccaattgttatgtcttctagaattcggttagcgcgtaatttagaaaatcatgtgcatccactaatgtatgctactgaaaatgatggatttagagttataaatgaggtacaagatgccttgccaaattttgaattaatgcgtcttgatcaaatggatcaacaaagtaaaatgaaaatggttgcaaagcatttgattagtcctgaactaataaaacaaccagcagccgcagtattagtgaatgatgatgaatctttaagtgtcatgataaatgaagaggaccatattcgtattcaagctatgggaactgacacaacattacaggctttatataatcaagcttcatcaattgatgatgaattagatcgaagccttgatataagttatgatgaacaacttggttatttaactacatgtcctaccaatataggtactggtatgagagcaagcgtgatgctacatttaccaggtctatctattatgaaaagaatgacacggattgctcaaaccattaatcgttttggatatacaatcagaggtatttacggtgaaggttcgcaagtttatggacatacttatcaagtatccaaccaacttacacttggtaaatctgagttagaaatcatagaaacattaacagaagttgttaatcaaatcattcatgaagaaaaacaaatacgacaaaagttagacacttataatcaattagaaacacaagaccgtgtttttcgctcgctaggtattttacaaaactgtagaatgataactatggaagaggcttcttatagattaagcgaagttaaacttggtatagatttaaattacattgaattacaaaactttaaatttaatgaattgatggtagctatacagtcaccatttttattagatgaagaagatgacaaatctgtaaaagaaaaacgagcagatatactaagagaacatataaagtaggaggtcattatttatgttatttggtagattaactgaacgtgcacagcgcgtattagcacatgcacaagaagaagcaattcgtttaaatcattcaaatataggaacagaacacctattattggggttaatgaaagaacctgaaggaattgctgcaaaagtattagaaagttttaatatcactgaagataaagtaattgaagaagttgaaaaattaatcggacatggtcaagatcatgttggtacattgcattatacacctagagctaaaaaagtcattgaattatcgatggatgaagctagaaaattacatcacaattttgttggaacggaacatattttattaggcttgattcgtgaaaatgaaggtgttgcagcaagagtttttgcaaatctagatttaaatattactaaagcacgtgcacaagttgtgaaagctttaggaaaccctgaaatgagtaataaaaatgcacaagctagtaagtcaaataatactccaactttagatagtttagctcgtgacttaacagtcattgccaaagacggtacattagatcctgttataggacgtgataaagaaattacacgtgtaattgaagtattaagtagacgtacgaaaaacaatcctgtgcttattggagagccaggtgttggtaaaactgctattgctgaaggtttagcgcaagccatagtgaataatgaggtaccagagacattaaaagataagcgtgttatgtctttagatatgggaacagtagttgcaggtactaaatatcgtggtgaatttgaagagcgtctgaaaaaggttatggaagaaatccaacaagcaggtaatgtcatcctatttattgatgagttgcatactttagttggtgctggtggtgctgaaggtgctatcgatgcttcgaatattttgaaaccggcattagcacgtggtgaattacaatgcattggtgctactacattagatgaatatcgcaaaaatattgaaaaagacgcggctttagaacgtcgtttccaacctgtacaagttgatgaaccttcagtagtagatacagttgctattttaaaaggattaagagatcgttacgaagcacaccatcgtattaatatttcagacgaagctattgaagcagctgttaaattaagtaacagatacgtttcagatcgtttcttaccagataaagcaattgatttaattgacgaagcaagttctaaagtaagacttaagagtcatacgacacctaataatttaaaagaaattgaacaagaaattgaaaaagttaaaaatgaaaaagatgcggcagtgcatgctcaagagtttgaaaatgctgctaatctgcgtgataaacaaacaaaacttgaaaagcaatatgaagaagctaaaaatgaatggaagaacgcacaaaatggcatgtcaacttcattgtcagaagaagatattgctgaagtcattgcaggatggacaggtatcccattaactaaaatcaacgaaacagaatctgaaaaacttcttagtctagaagatacattacatgagagagttattgggcaaaaagatgctgttaattcaatcagtaaagcggttagacgtgcccgtgcagggttaaaagatcctaaacgaccaattggtagctttatcttccttggaccaactggtgttggtaaaactgaattagctagagctttagctgaatcaatgtttggcgatgatgatgcgatgatccgtgtagacatgagtgaatttatggaaaaacacgcagtgagccgattagttggtgctcctccaggatatgttggtcatgatgatggtggacaattaactgaaaaagttagacgtaaaccatattctgtaattttatttgatgaaattgaaaaagcacatccagatgtatttaatattctattacaagttttagatgacggacatttgacagatacaaaaggacgtacagttgatttcagaaatacaattatcataatgacatcaaacgttggagcacaagaattacaagatcaacgatttgctggattcggtggttcaagtgatggacaagattatgaaacaattcgaaaaacgatgttaaaagaattaaaaaattcattccgtccagaatttttaaaccgtgtagatgatatcattgtattccataaactaacaaaagaagaattaaaagaaattgtaactatgatggttaataaattaacaaatcgattatccgaacaaaacataaatattattgttactgataaagcgaaagataaaatcgcagaagaaggatatgatccagaatatggtgcaagaccattaattagagcgatacaaaaaactatcgaagataatttaagtgaattaatattagatggtaatcaaattgaaggtaagaaagttacagtagatcatgatggtaaagagtttaaatatgacattgctgaacaaacttcagaaactaaaacaccatcgcaagcataattttaaaacagtccaaaacaaattaaagttttgggctgttttttagtagcattgaactatagaaattcgtgaaagtatccaccaacgaaacaatctaataaaataatcatcaaaggatagttaagaattatatgaaacaagttaatgagcatacagtgatagtaaaaaggtatgaatttttataaaggttttttgtttgaagatactagcaacttacgtcaaaataaaataggtctatataatattgtgataaatctagagaaaagagtttactaagaaattattaagattttatctttgaaagataccgactatcaacatgatgtaagtttattttataatattcataaaaaataaatatgataaaacagtttgcgttagtagtcatgttaaaatacaaacaaatgtaactcacatttaatttgtcataatgggaatgtgcgtttaaaatagatttgttcaaaggaaagtggaggtgcaattttggccaagaaaaaagtgatttttgaatgtatggcttgtggttatcaatctcctaaatggatgggaaaatgtcctaattgtggcgcttggaatcaaatggaggaaattgttgaaaaagcagccaatcctaaacatggagtgaaaaccaaggaattagcaggtaaagtacaaaaattaaatagtattaaacatgaaacaacgccaagagtgttaacagattcagcagaattcaaccgtgtattaggtggaggtattgtgagcggatcgttagtacttattggtggggatccaggtattggtaagtcaacgttacttttacaaatttgtgcatcgttatctcaaaagaaaaaagtactatatattactggagaagaatcgcttagtcagactaaattacgtgcagagcgattagatgaagattcaagtgaattgcaagtgttagctgaaacagatcttgaagttatttatcaaacagtaaaagaagaacaacctgatttactagtagtggattcgattcaaacaatatatcatcctgaaatcagctctgcaccaggttctgtttcacaagttcgtgaaagcacacaaagtttaatgaatattgctaaacaaatgaacattgcaacttttatagtgggtcatgtaacgaaagaaggtcaaattgctggcccaagattgctagaacacatggttgatactgtgctttattttgaaggcgatgaacaccacgcatatcgaattttgcgagctgttaaaaaccgttttggttcaacgaatgaaatgggaatcttcgaaatgaagcaaagtggattaaaaggtgtaaataatccatctgaaatgtttttagaagaacgttcaacaaatgttccaggttcaacaattgttgcaaccatggagggaaccagaccacttttaatagaagttcaagcgctggtaactccaacgacttttaacaatccgagacgaatggcaacagggattgatcataatcgattaagtttgttgatggctgttttggaaaagaaagaaaattatctattacaacaacaagatgcttatatcaaagtagctggcggtgtaaagttaacggagccagcagttgatctaagtgtaattgtagcaactgcgtctagctttaaagataaagctgtcgacggattagattgctatattggagaagttggtttaacgggtgaggtacgtcgtgtatctcggatagaacaacgcgtgcaagaggctgcaaaactaggtttcaaacgtgtaattattcctaaaaataatataggcggatggacatatcctgaaggtatacaagtaataggtgtaactactgtacatgaagcattgtcgtttgctcttcattcataaaacatcaagaaaggaggacattgtgtgaatatcgttaaactaatggttattattatttacttaattattgggagcgcattaggaataattattattcctgaaattgcaaatgatcttggattacaaaactccagctttttaaaaaatcactatgtagatggcattatcggtagtatttttatgttcttaatttttggtgtatttattagacgagttactaacgctataaaaggtttagaacattttattatgcgtagaagtgctgttgaaatactattcgcaacaataggtttaataatcggattacttatttctgttatggtgtcgtttatattggaatcaattggcaactctatttttaatcatttcattcctgtcataattacgatattactatgttatttcggtttccaatttggccttaaaaaacgagatgaaatgttaatgtttttacctgagaatatagcgcgttccatgtcacaacatactaaaagtgctacaccaaaaattatcgacacaagcgcaattattgatggtcgtattttagaagtcattcgttgcggttttatcgatggcaatattttaattccacaaggtgttattaatgaattacaaattgttgcagattcaaatgacagtgttaaacgtgaaaagggtaaaagaggcttagatattttaaatgaattgtatgatttagattatcctacaaaagtcatacatccaactaaaacacatagtgatattgatacaatgctattaaaactagcaaaacaatatcacgcaaatattataacgacagactttaatttgaataaagtttgtcatgtacatggtatcaaagcattaaatgttaatgatttatcagaagcaatcaaacctaatgtacatcaaggtgatcaacttcatattttactgacaaaaatgggtaaagagcctggtcaagcagtaggatatctagatgatggtacgatggtagttgttgataatgctaaaaatcttattggcagtcatgtcaatttagaagtagtcagcttattgcaaacatcttcaggaagaattgtttttgctaaaaaaatcgaagatacagtatcattataaaaactgtagttgacggaaacaaaatagatattaaaaggtatatgaaatggcgaagtttgtaatttgaagtataactataaatagatgcaaaacatatcagttatcaaaaaatacaaatagtgctaatatatcattgaaacaagttcattaagtgttaaattttagatattaataaagttattcttatagcaatcaagatatacaaaattagaatcaattttaacgtatttgaatagttaatttgaagtttaattttacagtacataatattcatttttaagtcgttgaaatacgtatgtagtgcagtcttgattcttagggatagcttttttaaagtgttgaaaaaacaactgctttctatttaaaatttaagcatattacccagggaattatgttatgattaaacaatgaaattattttaaggtcatgttaaaaagcattgtttcgttttaacaataagacgagttacacatttgttatgacggtcgaagatagcaaatgaacaatttatatgaactaacttgaaaatctgatatttaatttaggagtgaaaaaaatgagcgatcgtataagagtaagatatgcaccaagtccaactggttatcttcatattggtaatgcaagaacagcattattcaattacttgtatgctaaacattacaacggagattttgtgattcgaattgaagatactgataaaaaacgtaatttagaagatggagaaacatcacaatttgataatcttaaatggttaggattagattgggatgagtctgtagataaagacaatggctacggaccatatcgtcaatctgaacgtcaacatatctaccaaccattaatagatcagttactagcagaagataaagcatataaatgctatatgacagaagaagaattagaagctgaacgtgaagcgcaaatcgctcgtggtgaaatgcctcgctatggtggtcaacatgcgcatttgactgaagaacaacgtcaacaatttgaagcagaaggacgccaaccatcaattcgtttccgagtacctcaaaatcaaacgtattcatttgatgatatggttaaagggaatatttcatttgattcaaatggtattggtgactgggttatcgttaaaaaagatggcattccaacgtacaattttgcagtagctatagatgatcattacatggaaatttcagatgtcattcgtggtgatgatcatatttcaaacacgcctaaacaaattatgatttatgaagcatttggctgggagccacctcgttttggtcatatgtcattaattgttaatgaagaacgtaaaaagttaagtaaacgtgatgggcaaattttacaatttattgagcaatatcgtgacttaggttatttacctgaagcgttatttaattttattgcgttattaggttggtctcctgaaggtgaagaagaaatcttttctaaagaagaatttatcaaaatctttgatgaaaagcgtttatcaaaatcaccagcatttttcgataagcaaaaattagcatgggttaataaccaatatatgaaacaaaaagatactgaaacagtattccaattagcattacctcatttaattaaagcgaatttgattcctgaggtgccgtcagaagaggatttatcttggggacgcaaattaattgcgctttatcaaaaagaaatgagttatgccggtgaaattgtacctttatcagaaatgttctttaaagaaatgccagctcttggtgaggaagaacaacaagtgatcaatggagagcaagtaccagagttaatgacgcacttattcagtaaattagaagcacttgaaccatttgaagcggctgaaattaaaaagacaattaaagaagttcaaaaagaaacaggaataaaaggcaagcaattatttatgcctattcgtgttgctgtaacaggccaaatgcatggtcctgaattaccaaatacaattgaagtacttggtaaagaaaaagtgctaaaccgtttaaaacaatataagtaatgaaatagacaagatcaaggtagtatatacttgaattttataacgtaaccacatatgataaagttgtattaacaaattacaacaatatgaatagagtattttataaaaaacgaaggattagtaattaaatttatacgatgcagagagtgtacggttgctgtgagtacaacgtagaaattaatgaatgcaccttcgtaaaatgaattaaatatataatgagagtgatgagcattaagttgacttagtttccttgataatttggaagcgcccgcaattttattaatgtaattcgctaaattcagagtggaaccgtgcggaagcgcctctaacaatacaatttgtatgttagtggtgctttttttgatatttaatttcgcaggtacttcaattatgtatttacgtagttcaatcattgaggaggaaatgatcttgttaaaaagaatgagagacgatataaaaatggtatttgagcaggatccagcggcacgttcaacattagaagtgattacaacgtatgcaggtttacatgcagtttggagtcatttgattgcacataagttatacaaccaaaaaaaatatgttgcagcacgcgcgatatctcaaatttcaagatttttcacaggtatagaaatccatccaggtgctaaaattggaaagcgtctatttatagatcatggtatgggcgttgtaataggagaaacatgtacaattggtgataatgtgacaatctatcaaggcgtgacacttggtgggacagggaaagaaagagggaaaagacacccagatataggagacaatgttttaatagcagcgggtgcgaaagttttaggaaatattaaaataaattcaaatgtaaatattggtgcaaattcagttgttttacaatcagttccaagttattcaacggttgttggtataccaggacatattgttaagcaagatggtgttcgagttggaaaaacatttgatcatcgccatctacctgatccaatttatgaacaaattaagcatttagaacgacaacttgaaaagactaggaatggagagattcaagatgattacattatataatacgcttacacgtcaaaaagaagtgttcaagccaatagaaccaggaaaagtaaaaatgtatgtgtgtggtcctactgtatataactacattcatattggtaacgcgagaccagcaattaattatgacgtagtgagacgttactttgaataccaaggatataatgtagaatatgtatcaaattttacagatgtagatgataaattaattaaacgttctcaagaattaaatcagtctgttcccgaaattgcagaaaaatatatcgctgcttttcatgaagatgttggtgcgttaaatgttagaaaagcgacttcaaatccaagggtaatggaccatatggatgacattattcaatttattaaagatttggtggatcaaggttatgcatatgaaagtggtggcgatgtttactttagaacacgtaaatttgaaggttatggtaaattaagtcatcaatccatagatgacttaaaagtgggtgctcgtatagatgcaggagagcataaggaagatgcacttgattttactttgtggaaaaaagcgaagcctggcgagattagttgggatagcccatttggtgaagggagaccaggatggcatattgaatgttctgtaatggcatttcatgagctaggagctacaattgatatacatgcgggtggttcagatttacaatttccacatcatgaaaatgaaatagcacaatcggaagcacataatcatgcgccattcgctaattattggatgcataatggttttattaatattgataatgaaaaaatgagtaaatcactaggcaactttattttagttcacgatattattaaagaagttgatccagatgtattaagattctttatgattagcgtacattatagaagtccaattaactataatctagaattggttgaatcagcacgtagtggattagagcgtattcgcaatagttatcaattaattgaagagcgcgcacaaattgctactaatattgaaaatcaacagacatatattgatcaaattgatgcgattttaaatcgttttgaaacagttatgaatgatgattttaatacagctaatgcaattacagcttggtatgatttagcaaaacttgcgaataaatatgtactagagaatacaacatcaacagaagtaattgataaatttaaagcagtttatcaaattttcagcgatgttttaggtgtaccgttaaaatctaaaaatgcagatgaattattggatgaagatgttgaaaaattaatcgaagagcgtaatgaagcaaggaaaaacaaagattttgcacgagcagatgagattcgagacatgctgaaatcacaaaacattatattagaagacacacctcaaggggttagatttaaacgtggataatcaacaagataatcacattaaattattgaatccattgaccttagcatatatgggagacgcagtcttagatcaatatgtacgtacgtatatcgttttaaagcttaaaagtaagcctaataaactacatcaaatgtctaaaaaatatgtatctgccaaaagtcaggcgcaaacgttagaatatttaatggagcaagaatggtttacagacgaagaaatggatattttgaagcgagggcgtaacgcgaaaagtcatactaaagctaaaaatactgatgttcaaacatatcgtaaaagttcagcgatagaagcagtgataggttttctttatttagaaaaaagagaagaacgattagaggcattattaaatgaaataataacaatagtaaacgaaaggtagtgacaatgtggaagatacggttattgttggtaggcatgctgttagagaagcgattattactgggcatccgataaataagatattgattcaagaaggaattaaaaagcaacaaattaatgaaattttaaaaaatgcaaaagatcaaaaaatcattgttcaaactgtaccaaaatctaaattagattttttagcaaatgcaccacatcagggtgttgcagcacttattgcaccatatgaatatgctgacttcgatcaatttttaaaacagcaaaaagaaaaagaaggtttatcgacagtacttatattagacggcttagaagacccgcataacttgggatcaattttaagaacagcagatgcaacgggagttgatggtgttattattcctaaacgtcgttcagttacactaacgcaaacagttgcaaaagcctcaacaggtgcaattgaacatgtaccagttattcgagtgacaaatttagctaaaactatcgatgaactaaaagataatggcttttgggtagctggcactgaagctaataatgcaacagattatagaaatcttgaagcggacatgtcattggctattgtaattggcagcgaaggacagggtatgagtcgtctagtaagtgataaatgcgatttttatattaagattccaatggttggacatgtaaacagtttgaatgcttcggttgcagcaagtttaatgatgtacgaagtatttcgaaaaagacatgatgttggagaaatataatgaaagaacgttacttaatcattgatggatacaatatgataggacaatcaccaacgctaagcgccattgcaaaagagaatttagaagaagctagaatgcaattaatagatgcaattgcaaattataatgcagttatttcagatgaaattatttgtgttttcgatgcttatgaccaatcgggtgttgaaagagaatacatgtatcatggcgttaaaacgatttttaccaaggaaaaagaaacagctgatagtttcatagaacgttatgtctatgaactttatgacaagcacactaagcatattacagttgtaacaagtgatatgagtgagcaacatgctatctttggatcaggtgcatatagaatatcatctcgcgaaatgtggagagatttaaaagaaaatgaaattgatgtgagtaaatcattagatgatataagtgaaaacaagccaagaactcgaattccgttatcttctgaaatccttgcagaatttgaaaaaatacgaagaggacatcataagaaatgacatttccgtcatcttgaaattttgaatgtaacaatattaaactaactttaaatttttagatagaaggggttagtttaatacttgaaatatgatttgacaactcaagacagtacaatcaaacgtaacaatgcaataaatgataaagacttcgaaaagttagtaatggatctacaaccattaattattcgacgcatcaaaacatttggatttaatcattatgatttagaagacttatatcaagaaatacttatacggatgtataggtcggtccaaacatttgattttagtggaaagcagcctttcacaaattatgttcagtgtttaattacgtctgtaaagtatgattatttgagaaaatatttagctacaaataaaagaatggataatttgattaatgaatatagagttacgtatccatgtgcaataaagcgttatgatgttgaaaacaattatttgaataaattagcaattaaagagttgattcgtcagtttaagtatttgagtgcatttgaaaaagatgtcatgtatttaatgtgtgaacaatataagccgagagaaattgctcaactgatgcatgtaaaagagaaagtgatttataatgccatacaacgatgtaaaaataaaataaaacgttatttcaaaatgatttgaaaagcgccctaggacgtgaattgaattagaacgtgttacttcctgatggtttgacatttgttataaattttatgtatagtatactggtattataatgaataaaggtgaattattgtgaggaaaatacctttaaattgtgaagcttgtggcaatagaaattataatgttcctaagcaagaaggctcggcaacaagattaaccttaaagaaatattgtccaaaatgtaacgcgcacacaattcataaagaatcgaaataaatacattcgaaataatactttgataatatgttcaaaggatttggaggttgagcagatggctaaaaaagaaagtttctttaaaggcgttaagtctgaaatggaaaaaacaagttggccgacgaaagaagagctatttaaatatactgtaattgtagtttctactgttatattcttcttagtctttttctatgccttagatttaggaattacagcattgaaaaatttattatttggttagaggagtgaagacatgtctgaagaagttggcgcaaagcgttggtatgcagtgcatacatattctggatatgaaaataaagttaaaaagaatttagaaaaaagagtagaatctatgaatatgactgaacaaatctttagagtagtcataccggaagaagaagaaactcaagtaaaagatggcaaagctaaaacgactgttaaaaaaacattccctggatatgttttagtggaattaatcatgacagatgaatcatggtatgtggtaagaaatacaccaggcgttactggttttgtaggttctgcaggtgcagggtctaagccaaatccattgttaccagaagaagttcgcttcatcttaaaacaaatgggtcttaaagaaaagactatcgatgttgaactcgaagttggcgagcaagttcgtattaaatcaggtccatttgcgaatcaagttggtgaagttcaagaaattgaaacagataagtttaagctaacagtattagtagatatgtttggccgagaaacaccagtagaagttgaattcgatcaaatagaaaagctttaattaacaattaaagttattaaactaaccaaaagataaaaaagagtattgattttttaattagaaaagtgttaaaattatgtggtcgcgcttttagagcgcccatttcgtcacgaaatgttaagagtgggagggcaaaactgagccctgtgaccacatcacgatatcaaggaggtgcacatcgtggctaaaaaagtagataaagttgttaaattacaaattcctgcaggtaaagcgaatccagcaccaccagttggtccagcattaggtcaagcaggtgtgaacatcatgggattctgtaaagagttcaatgcacgtactcaagatcaagcaggtttaattattccggtagaaatcagtgtttatgaagatcgttcatttacatttattacaaaaactccaccggctccagtattacttaaaaaagcagctggtattgaaaaaggttcaggcgaaccaaacaaaactaaagttgctacagtaactaaagatcaagtacgcgaaattgctaacagcaaaatgcaagacttaaacgctgctgacgaagaagcagctatgcgtattatcgaaggtactgcacgtagtatgggtatcgttgtagaataattttacgaatattaaatttgattacatgatttaaacgatgaagcagataacagagataataatgatgaattataaatataatctgaatgactagattaatgattgatttattcataagattaattcttctgttgtctgctcttaacttgcatctagcaagtaatgtgggaggaaattccgctaaaaccactaaaggaggaactataaatggctaaaaaaggtaaaaagtatcaagaagcagctagtaaagttgaccgtactcagcactacagtgttgaagaagcaattaaattagctaaagaaacaagcattgctaactttgacgcttctgttgaagttgcattccgtttaggaattgatacacgtaaaaatgaccaacaaatccgtggtgcagttgtattaccaaacggaactggtaaatcacaaagtgtattagtattcgctaaaggtgacaaaattgctgaagctgaagcagcaggtgctgactatgtaggtgaagcagaatacgttcaaaaaatccaacaaggttggttcgacttcgatgtagtagttgctacaccagacatgatgggcgaagttggtaaattaggtcgtgtattaggaccaaaaggtttaatgccaaaccctaaaactggaactgtaacaatggatgttaaaaaagctgttgaagaaatcaaagctggtaaagtagaataccgtgctgaaaaagctggtatcgtacatgcatcaattggtaaagtttcatttactgatgaacaattaattgaaaacttcaatactttacaagatgtattagctaaagctaaaccatcatctgctaaaggtacatacttcaaatctgttgctgtaactacaacaatgggtcctggagttaaaattgatactgcaagttttaaataataaatgatataaacaattacaggctgaaagaaatatctttcagtctgtaaaaatatattgacaataagtaatttccaagttatattacttattgtgattattttacctaagacagtaggagttatttataacttaaaatttatcctaccgaggctaaaattgacttgaacgtgatgatctatgatctttcaagcactttttgccgtgggtagaaagtgctttttttattaattttaaaaaaagcaccaaaaatttaaatggaggtgtctgaatgtctgctatcattgaagctaaaaaacaactagttgatgaaattgctgaggtactatcaaattcagtttcaacagtaatcgttgactaccgtggattaacagtagctgaagttactgacttacgttcacaattacgtgaagctggtgttgagtataaagtatacaaaaacactatggtacgtcgtgcagctgaaaaagctggtatcgaaggcttagatgaattcttaacaggtcctactgctattgcaacttcaagtgaagatgctgtagctgcagcgaaagtaatttctggatttgctaaagatcatgaagcattagaaattaaatcaggcgttatggaaggcaatgttattacagcagaagaagttaaaactgttggttcattaccttcacacgatggtcttgtatctatgcttttatcagtattacaagctcctgtacgcaacttcgcttatgcggttaaagctattggagaacaaaaagaagaaaacgctgaataatttttagcgtaaaaaaattaaaaataatggaggaattataaaatggctaatcatgaacaaatcattgaagcgattaaagaaatgtcagtattagaattaaacgacttagtaaaagcaattgaagaagaatttggtgtaactgcagctgctccagtagcagtagcaggtgcagctggtggcgctgatgctgcagcagaaaaaactgaatttgacgttgagttaacttcagctggttcatctaaaatcaaagttgttaaagctgttaaagaagcaactggtttaggattaaaagatgctaaagaattagtagacggagctcctaaagtaatcaaagaagctttacctaaagaagaagctgaaaaacttaaagaacaattagaagaagttggagctactgtagaattaaaataattcaagtatcttaaacttaataatcaaagttttatagcaagcattgctataatataatgattctttgagaagttaaaaccccgttattttgataacggggttttattcatttaaagactgagtaaaatgttataattataatgacgagttacaaagtgaagatgaggtggaataatgagtcattattatgatgaagatccaagtgtaattagcaatgaacaacgtattcaatatcaattaaaacatcataaaattgatttaataactgataacggagtgttttcgaaagataaagtagattatggttcagatgttcttgttaaaacttttttaaaaacgcatccacctggtccaagtaagcgaattgccgatgttggttgtggttacggaccaattggtttgatgattgctaaagtatcaccacatcattcaattacaatgctagatgttaatcacagagcgctagccttagttgaaaaaaacaaaaaattaaacggtattgataatgtgatcgtaaaggaaagtgatgctttgtctgctgtggaagacaaaagttttgattttattttaaccaatccaccaataagagcagggaaagaaaccgtgcatcgtatattcgagcaagcattacatagattagactcgaacggtgaactattcgttgtaattcagaagaagcaaggcatgccatctgcaaagaaaagaatgaatgaactttttggaaatgtagaagtggtaaataaagataaaggatattacattctgagaagtataaaagcttgaaatgaaatggatattctgttatagttatataatgtaaaaatttatgttcaataagtgtgtacttttacgttaaatagataagttaattaagaataaatatagaatcgaaaatggtgtcatcattagtgttgccgttttctttttgtctttttattaatatgcttatggtatttagctaaaagcggatcacataatttttgaggggtgaatctgtttggcaggtcaagttgtccaatatggaagacatcgtaaacgtagaaactacgcgagaatttcagaagtattagaattaccaaacttaatagaaattcaaactaaatcttacgagtggttcctaagagaaggtttaatcgaaatgtttagagacatttctccaattgaagattttactggtaatttgtcattagagtttgtggattaccgtttaggagaaccaaaatatgatttagaagaatctaaaaaccgtgacgctacttatgctgcacctcttcgtgtaaaagtgcgtctaatcattaaagaaacaggagaagttaaagaacaagaagtctttatgggtgatttcccattaatgactgatacaggtacgttcgttatcaatggtgcagaacgtgtaatcgtatctcaattagttcgttcaccatccgtttatttcaatgaaaaaatcgacaaaaatggtcgtgaaaactatgatgcaacaattattccaaaccgtggtgcatggttagaatatgaaacagatgctaaagatgttgtatacgtgcgtattgatagaacacgtaaactaccattaacagtattgttacgtgcattaggtttctcaagtgaccaagaaattgttgaccttttaggtgacaatgaatatttacgtaatactttagagaaagacggcactgaaaacactgaacaagcgttattagaaatctatgaacgtttacgtccaggtgaaccaccaactgttgaaaatgctaaaagtctattgtattcacgtttctttgatccaaaacgctatgacttagcaagcgtgggtcgttataaaacaaacaaaaaattacatttgaaacatcgtttattcaatcaaaaattagctgagccaattgtaaatactgaaactggtgaaattgtagttgaagaaggtacagtgcttgatcgtcgtaaaatcgacgaaatcatggatgtacttgaatcgaacgcaaacagcgaagtgtttgaattgcatggtagcgtaatagacgagccagtagaaattcaatcaattaaagtatatgttcctaacgatgatgaaggtcgtacgacaactgtaattggtaatgctttccctgactcagaagttaaatgtattacaccagcagatatcatcgcttcaatgagttacttctttaacttattaagtggtattggatatacagatgatattgaccatttaggtaaccgtcgtttacgttctgtaggtgaattactacaaaaccaattccgtatcggtttatcaagaatggaaagagttgtacgtgaaagaatgtcaattcaagatactgagtctatcacacctcaacaattaattaatattcgacctgttattgcatctattaaagaattctttggtagctctcaattatcacaattcatggaccaagcaaatccattagctgagttaacgcataaacgtcgtctatcagcattaggacctggtggtttaacacgtgaacgtgctcaaatggaagtacgtgacgttcactactctcactatggccgtatgtgtccaattgaaacacctgagggaccaaacattggattgattaactcattatcaagttatgcacgtgtaaataaattcggctttattgaaacaccatatcgtaaagttgatttagatacacatgctatcactgatcaaattgactatttaacagctgacgaagaagatagctatgttgtagcacaagcaaactctaaattagatgaaaatggtcgtttcatggatgatgaagttgtatgtcgtttccgtggtaacaatacagttatggctaaagaaaaaatggattatatggatgtatcgccgaagcaagttgtttcagcagcgacagcatgtattccattcttagaaaatgatgactcaaaccgtgcattgatgggtgcgaacatgcaacgtcaagcagtgcctttgatgaatccagaagcaccatttgttggaacaggtatggaacacgttgcagcacgtgattctggtgcagctattacagctaagcacagaggtcgcgttgaacatgttgaatctaatgaaattcttgtacgtcgtctagttgaagagaacggcgttgagcatgaaggtgaattagatcgctatccattagctaaatttaaacgttcaaactcaggtacatgttacaaccaacgtccaatcgttgcagttggagatgttgttgagtataacgagattttagcagatggaccatctatggaattaggagaaatggcattaggtagaaacgtagtagttggtttcatgacttgggacggttacaactatgaggatgccgttatcatgagtgaaagacttgtgaaagatgacgtgtatacttctattcatattgaagagtatgaatcagaagcacgtgatactaagttaggacctgaagaaatcacaagagatattcctaatgtttctgaaagtgcacttaagaacttagacgatcgtggtatcgtttatattggtgcagaagtaaaagatggagatattttagttggtaaagtaacgcctaaaggtgtaactgagttaactgccgaagaaagattgttacatgcaatctttggtgaaaaagcacgtgaagttagagatacttcattacgtgtacctcacggcgctggcggtatcgttcttgatgtaaaagtattcaatcgtgaagaaggcgacgatacattatcacctggtgtaaaccaattagtacgtgtatatatcgttcaaaaacgtaaaattcatgttggtgataagatgtgtggtcgacatggtaacaaaggtgtcatttctaagattgttcctgaagaagatatgccttacttaccagacggacgtccgatcgatatcatgttaaaccctcttggtgtaccatctcgtatgaacatcggacaagtattagagctacacttaggtatggctgctaaaaatcttggtattcacgttgcatcaccagtatttgacggtgcaaacgatgacgatgtatggtcaacaattgaagaagctggtatggctcgtgatggtaaaactgtactttatgatggacgtacaggtgaaccattcgataaccgtatttcagtaggtgtaatgtacatgttgaaacttgcgcacatggttgatgataaattacatgcgcgttcaacaggaccatattcacttgttacacaacaaccacttggcggtaaagcgcaattcggtggacaacgtttcggtgagatggaggtatgggcacttgaagcatatggtgctgcatacacattacaagaaatcttaacttacaaatccgatgatacagtaggacgtgtgaaaacatacgaggctattgttaaaggtgaaaacatctctagaccaagtgttccagaatcattccgagtattgatgaaagaattacaaagtttaggtttagatgtaaaagttatggatgagcaagataatgaaatcgaaatgacagacgttgatgacgatgatgttgtagaacgcaaagtagatttacaacaaaatgatgctcctgaaacacaaaaagaagttactgattaatacgcaatttacaaaacaggcaaaaagatactaagctgaattttatagatgattcagtttagtactttaagccattttaaataaatgcaaatcaatcaaatagcacagctaatctaaattgaaggaggtaggctccttgattgatgtaaataatttccattatatgaaaataggattggcttcacctgaaaaaatccgttcttggtcttttggtgaagttaaaaaacctgaaacaatcaactaccgtacattaaaacctgaaaaagatggtctattctgtgaaagaattttcggacctacaaaagactgggaatgtagttgtggtaaatacaaacgtgttcgctacaaaggcatggtctgtgacagatgtggagttgaagtaactaaatctaaagtacgtcgtgaaagaatgggacacattgaacttgctgctccagtttctcacatttggtatttcaaaggtataccaagtcgtatgggattattacttgacatgtcaccaagagcattagaagaagttatttactttgcttcttatgttgttgtagatccaggtccaactggtttagaaaagaaaactttattatctgaagctgaattcagagattattatgataaatacccaggtcaattcgttgcaaaaatgggtgcagaaggtattaaagatttacttgaagagattgatcttgacgaagaacttaaattgttacgcgatgagttggaatcagctactggtcaaagacttactcgtgcaattaaacgtttagaagttgttgaatcattccgtaattcaggtaacaaaccttcatggatgattttagatgtacttccaatcatcccaccagaaattcgtccaatggttcaattagatggtggacgatttgcaacaagtgacttaaacgatttataccgtcgtgtaattaatcgaaacaatcgtttgaaacgtttattagatttaggtgcacctggtatcatcgttcaaaacgaaaaacgtatgttacaagaagctgttgacgctttaattgataatggtcgtcgtggtcgtccagttactggcccaggtaaccgtccattaaaatctttatctcatatgttaaaaggtaaacaaggtcgtttccgtcaaaacttacttggtaaacgtgttgactattcaggacgttcagttatcgcggtaggtccaagcttgaaaatgtaccaatgtggtttaccaaaagaaatggcacttgaactgtttaaaccattcgtaatgaaagaattagttcaacgtgaaattgcaactaacattaaaaatgcgaagagtaaaatcgaacgcatggatgatgaagtttgggacgtattggaagaagtaattagagaacatcctgtattacttaaccgtgcaccaacacttcatagacttggtattcaagcatttgaaccaactttagttgaaggtcgtgcgattcgtctacatccacttgtaacaacagcttataacgctgactttgatggtgaccaaatggcggttcacgttcctttatcaaaagaggcacaagctgaagcaagaatgttgatgttagcagcacaaaacatcttgaaccctaaagatggtaaaccagtagttacaccatcacaagatatggtacttggtaactattaccttactttagaaagaaaagatgcagtaaatacaggcgcaatctttaataatacaaatgaagtattaaaagcatatgcaaatggctttgtacatttacacacaagaattggtgtacatgcaagttcattcaacaatccaacatttactgaagaacaaaacaaaaagattcttgctacgtcagtaggtaaaattatattcaatgaaatcattccagattcatttgcttatattaatgaacctacgcaagaaaacttagaaagaaagacaccaaacagatacttcatcgatcctacaactttaggtgaaggtggattaaaagaatactttgaaaatgaagaattaattgaacctttcaacaaaaaattcttaggtaatattattgcagaagtattcaacagatttagcatcactgatacatcaatgatgttagaccgtatgaaagacttaggattcaaattctcatctaaagctggtattacagtaggtgttgctgatatcgtagtattacctgataagcaacaaatacttgatgagcatgaaaaattagtcgacagaattacaaaacaattcaatcgtggtttaatcactgaagaagaaagatataatgcagttgttgaaatttggacagatgcaaaagatcaaattcaaggtgaattgatgcaatcacttgataaaactaacccaatcttcatgatgagtgattcaggtgcccgtggtaacgcatctaactttacacagttagcaggtatgcgtggattgatggccgcaccatctggtaagattatcgaattaccaatcacatcttcattccgtgaaggtttaacagtacttgaatacttcatctcaactcacggtgcgcgtaaaggtcttgccgatacagcacttaaaacagctgactcaggatatcttactcgtcgtcttgttgacgtggcacaagatgttattgttcgtgaagaagactgtggtactgatagaggtttattagtttctgatattaaagaaggtacagaaatgattgaaccatttatcgaacgtattgaaggtcgttattctaaagaaacaattcgtcatcctgaaactgatgaagttatcattcgtcctgatgaattaattacacctgaaattgctaagaaaattacagatgctggtattgaacaaatgtatattcgctcagcatttacttgtaacgcaagacacggtgtttgtgaaaaatgttacggtaaaaaccttgctactggtgaaaaagttgaagttggtgaagcagttggtacaattgcagcccaatctatcggtgaaccaggtacacagcttacaatgcgtacattccatacaggtggggtagcaggtagcgatatcacacaaggtcttcctcgtattcaagagattttcgaagcacgtaaccctaaaggtcaagcggtaattacggaaatcgaaggtgtcgtagaagatattaaattagcaaaagatagacaacaagaaattgttgttaaaggtgctaatgaaacaagatcatatcttgcttcaggtacttcaagaattattgtagaaatcggtcaaccagtacaacgtggtgaagtattaactgaaggttctattgaacctaagaattacttatctgttgctggattaaacgcgactgaaagctacttattaaaagaagtacaaaaagtttaccgtatgcaaggggtagaaatcgacgataaacacgttgaggttatggttcgacaaatgttacgtaaagttagaattatcgaagcaggtgatacgaagttattaccaggttcattagttgatattcataactttacagatgcaaatagagaagcatttaaacaccgcaagcgccctgcaacagctaaaccagtattacttggtataactaaagcatcacttgaaacagaaagtttcttatctgcagcatcattccaagaaacaacaagagttctaacagatgcagcaattaaaggtaagcgtgatgacttattaggtcttaaagaaaacgtaattatcggtaagctaattccagctggtactggtatgagacgttatagcgacgtaaaatacgaaaaaacagctaaaccagttgcagaagttgaatctcaaactgaagtaacggaataacaagtatataacagaggctaaggctttagcctcttgttatttttatgtaaattatttgatttaatgttgacgaattctcttgttcaatgttaatatattaaaggttgatgcaagcagaactttggaggataaattattgtctaaggaaaaagttgcacgctttaacaaacaacattttgtagttggtcttaaagaaacgcttaaagcgttaaagaaagatcaagttacatctttgattattgctgaagacgttgaagtatatttaatgactcgcgtgttaagccaaatcaatcagaaaaatatacctgtatcttttttcaaaagcaaacatgctttgggcaaatatgtaggtattaacgtcaatgcgacaatagtagcattgattaaatgagaattagtaagtgttttacttactaaattttatttaacctaaaaatgaaccacctggatgtgtgggattaaaaagtgaagagaggaggacatatcacatgccaactattaaccaattagtacgtaaaccaagacaaagcaaaatcaaaaaatcagattctccagctttaaataaaggtttcaacagtaaaaagaaaaaatttactgacttaaactcaccacaaaaacgtggtgtatgtactcgtgtaggtacaatgacacctaaaaaacctaactcagcgttacgtaaatatgcacgtgtgcgtttatcaaacaacatcgaaattaacgcatacatccctggtatcggacataacttacaagaacacagtgttgtacttgtacgtggtggacgtgtaaaagacttaccaggtgtgcgttaccatattgtacgtggagcacttgatacttcaggtgttgacggacgtagacaaggtcgttcattatacggaactaagaaacctaaaaactaagaatttagtttttaattaaatcttaaacttaaaatatttaatataaggaagggaggatttacattatgcctcgtaaaggatcagtacctaaaagagacgtattaccagatccaattcataactctaagttagtaactaaattaattaacaaaattatgttagatggtaaacgtggaacagcacaaagaattctttattcagcattcgacctagttgaacaacgcagtggtcgtgatgcattagaagtattcgaagaagcaatcaacaacattatgccagtattagaagttaaagctcgtcgtgtaggtggttctaactatcaagtaccagtagaagttcgtccagagcgtcgtactactttaggtttacgttggttagttaactatgcacgtcttcgtggtgaaaaaacgatggaagatcgtttagctaacgaaattttagatgcagcaaataatacaggtggtgccgttaagaaacgtgaggacactcacaaaatggctgaagcaaacaaagcatttgctcactaccgttggtaagataaaagcttttaccctgagtgtgttctatattaatgaattttcattaagcgttcatgcttagggcatcgccatatctatcgtatttattcagtaatataaactggaaggagaaaaaatacatggctagagaattttcattagaaaaaactcgtaatatcggtatcatggctcacattgatgctggtaaaacgactacgactgaacgtattctttattacactggccgtatccacaaaattggtgaaacacacgaaggtgcttcacaaatggactggatggagcaagaacaagaccgtggtattactatcacatctgctgcaacaacagcagcttgggaaggtcaccgtgtaaacattatcgatacacctggacacgtagacttcactgtagaagttgaacgttcattacgtgtacttgacggagcagttacagtacttgatgcacaatcaggtgttgaacctcaaactgaaacagtttggcgtcaggctacaacttatggtgttccacgtatcgtatttgtaaacaaaatggacaaattaggtgctaacttcgaatactctgtaagtacattacatgatcgtttacaagctaacgctgctccaatccaattaccaattggtgcggaagacgaattcgaagcaatcattgacttagttgaaatgaaatgtttcaaatatacaaatgatttaggtactgaaattgaagaaattgaaattcctgaagaccacttagatagagctgaagaagctcgtgctagcttaatcgaagcagttgcagaaactagcgacgaattaatggaaaaatatcttggtgacgaagaaatttcagtttctgaattaaaagaagctatccgccaagctactactaacgtagaattctacccagtactttgtggtacagctttcaaaaacaaaggggttcaattaatgcttgacgctgtaattgattacttaccttcaccactagatgttaaaccaattattggtcaccgtgctagcaaccctgaagaagaagtaatcgcgaaagcagacgattcagctgaattcgctgcattagcgttcaaagttatgactgacccttatgttggtaaattaacattcttccgtgtgtactcaggtacaatgacatctggttcatacgttaagaactctactaaaggtaaacgtgaacgtgtaggtcgtttattacaaatgcacgctaactcacgtcaagaaatcgatactgtatactctggagatatcgctgctgcggtaggtcttaaagatacaggtactggtgatactttatgtggtgagaaaaatgacattatcttggaatcaatggaattcccagagccagttattcacttatcagtagagccaaaatctaaagctgaccaagataaaatgactcaagctttagttaaattacaagaagaagacccaacattccatgcacacactgacgaagaaactggacaagttatcatcggtggtatgggtgagcttcacttagacatcttagtagaccgtatgaagaaagaattcaacgttgaatgtaacgtaggtgctccaatggtttcatatcgtgaaacattcaaatcatctgcacaagttcaaggtaaattctctcgtcaatctggtggccgtggtcaatacggtgatgttcacattgaattcacaccaaacgaaacaggcgcaggtttcgaattcgaaaacgctatcgttggtggtgtagttcctcgtgaatacattccatcagtagaagctggtcttaaagatgctatggaaaatggtgtcttagcaggttatccattaattgatgttaaagctaaattatatgatggttcataccatgatgtcgattcatctgaaatggccttcaaaattgctgcatcattagcacttaaagaagctgctaaaaaatgtgatcctgtaattttagaaccaatgatgaaagtaactattgaaatgcctgaagagtacatgggtgatatcatgggtgacgtaacatctcgtcgtggacgtgttgatggtatggaacctcgtggtaatgcacaagttgttaatgcttatgtaccactttcagaaatgttcggttatgcaacatcattacgttcaaacactcaaggtcgcggtacttacactatgtacttcgatcactatgctgaagttccaaaatcaatcgctgaagatattatcaagaaaaataaaggtgaataatataacttgttttgactagctagcctaggttaaaatacaaggtgagcttaaatgtaagctatcatctttatagtttgattttttggggtgaatgcattataaaagaattgtaaaattctttttgcatcgctataaataatttctcatgatggtgagaaactatcatgagagataaatttaaatattatttttaattagaataggagagattttataatggcaaaagaaaaattcgatcgttctaaagaacatgccaatatcggtactatcggtcacgttgaccatggtaaaacaacattaacagcagcaatcgctactgtattagcaaaaaatggtgactcagttgcacaatcatatgacatgattgacaacgctccagaagaaaaagaacgtggtatcacaatcaatacttctcacattgagtaccaaactgacaaacgtcactacgctcacgttgactgcccaggacacgctgactacgttaaaaacatgattactggtgctgctcaaatggacggcggtatcttagtagtatctgctgctgacggtccaatgccacaaactcgtgaacacattcttttatcacgtaacgttggtgtaccagcattagtagtattcttaaacaaagttgacatggttgacgatgaagaattattagaattagtagaaatggaagttcgtgacttattaagcgaatatgacttcccaggtgacgatgtacctgtaatcgctggttcagcattaaaagctttagaaggcgatgctcaatacgaagaaaaaatcttagaattaatggaagctgtagatacttacattccaactccagaacgtgattctgacaaaccattcatgatgccagttgaggacgtattctcaatcactggtcgtggtactgttgctacaggccgtgttgaacgtggtcaaatcaaagttggtgaagaagttgaaatcatcggtttacatgacacatctaaaacaactgttacaggtgttgaaatgttccgtaaattattagactacgctgaagctggtgacaacattggtgcattattacgtggtgttgctcgtgaagacgtacaacgtggtcaagtattagctgctcctggttcaattacaccacatactgaattcaaagcagaagtatacgtattatcaaaagacgaaggtggacgtcacactccattcttctcaaactatcgtccacaattctatttccgtactactgacgtaactggtgttgttcacttaccagaaggtactgaaatggtaatgcctggtgataacgttgaaatgacagtagaattaatcgctccaatcgcgattgaagacggtactcgtttctcaatccgtgaaggtggacgtactgtaggatcaggcgttgttactgaaatcattaaataatttctaatttcttagattttatataaaaagaagatccctcaatcgaggggtctttttttaatgtgtaaattttgtaatggttattcgatttagaagaacaataattgatgaaagactgactaataaaacttataactgataatactggttaaataaaattgttaagtattggacattgaaaaatgctcctctcaaagctttcattttttcaatgtctactttgaagggagcatttcattagtttatgtctcagattcatatctttcaattaatttaaatgcttaatttgttttaaatacttgctctaattcaatgattttcaaaaatacagctacagcgtattttaatgatttttcatcaatatcaaatttgggattatggtgtggcgctgtaatacctttactttcattaccacaaccagtcagaaagaatgcacctggtcgtactttcaaataatgtgaaaaatcttctccaatcatcattaaatctgattcattaaagcgtacatgtaagtcatttgttgcttctttaataacttgatatgctttctcgttgttatggacaggcaaatatcctttaatataattcaagtcatattcaatgtcatttgcaattgccaaaccttgtagtagcttatccattttatgcatgacatgttcttgtattttcgagtcaaatgtacgaactgtacctttacaaaatgcttgatcaggaataacgctatctgtggtgcctgcttgaatcattccaaatgaaagtacagcttgtttaactggatcgattgtacgtgaaattattttttgtgcacttaaaatgaactctgccatgattactattgggtcaatggtttcatgaggtttggcaccatgaccgccacgacctttaattgtgacactaaattcatctggagaggccatgattgcccccgcacgtgaatgaatagttccagtaggataaccactccataaatgtgtaccgtaaattctatctacattttccagacatccagcatctatcatttcttgagaaccacctggcataatttcttcaccgtattgaaatattaatacgacatttccatttaataaatgtttatgttcatctaaaatctctgctacagtaagtaaaattgctgtatgaccatcatgcccacacgcatgcatacatcctggatttttagacttataaggcacatcgtttaattcctcgacaggtaacgcatcaaagtcagctcttaatgcaatggtaggtcctgtgcccaaacctttaaatgtggctttgataccattgcggccgataggagtttcaatatcacaagataactggtttaattggttaacaatataatcatgtgtttgaaattcttcaaaagataactcaggatattggtgtaaataacgtctgagttgaattgttttattttctttattatttgctagttgaaaccaatctaacaccctaatcactactttctaaaatattgtttatagtataacattttatgaaattatcgtactaaatgattgctttgagatattttatctatgaatgataaggctttcaagttaagtggaattactgtatgataaaggtattaccaaacaatacttaagggggattatatactgtggttcaatcattacatgagtttttagaagaaaatataaattatctaaaagaaaatggtttgtataatgaaatagatacaattgaaggtgcaaacggaccagaaatcaaaatcaatgggaaatcatacattaacttatcttcaaataattatttaggactagcaacaaatgaagatttgaaatcagctgcaaaagcagctattgatacacatggtgtaggtgcaggcgctgttcgtacaatcaatggtacattagatttacacgacgaattagaggaaacactagcaaaatttaaaggaacagaagctgcaatagcttatcaatcaggatttaattgtaatatggctgctatttcggctgttatgaataaaaatgatgctattttatcagatgagcttaatcatgcatcaattattgatggatgtcgcttatcaaaagctaaaattattcgagttaaccattcagacatggatgatttacgtgcgaaagcaaaagaagcagttgaatcaggtcaatacaataaagtgatgtatatcactgatggcgtttttagtatggatggtgatgtggctaaattacctgaaattgtagaaattgcagaagaatttggtttattaacttatgttgacgacgctcatggttcaggtgttatgggcaaaggcgctggtacggttaaacattttggtttacaagataaaatcgatttccaaattggtacgctttctaaagcaattggtgtcgttggcggttatgtagcaggtacaaaagagttaatagattggttaaaagcacaatcacgaccattcttattctctacatcattagcacctggggatactaaagcaatcactgaagcagttaaaaagttaatggcttcaactgaattacatgataaattatgggacaatgcgcaatatttaaaaaatggattgtcaaaattaggatatgatacaggtgagtcagaaactccaattacaccagtaattattggtgatgaaaaaacaactcaagaatttagtaagcgtttgaaagacgaaggtgtctatgtgaaatctatcgttttcccaacagtgccaagaggtacaggacgtgtaagaaatatgcctacagctgcacatacaaaagacatgttggatgaagcaattgtggcttatgaaaaagtaggaaaagaaatgaatttaatttaatatatatatttattcccacggcaaatatcgtcgtgggctttttttaaaatgcttagtttattaacagtaagtggttataacaatgtttagtgttatcaaccattaaagtttgaattttaaaagcatcttgtagaatttagttgtatttttacaaagaaattcattttgattatttttgataatgagcattttaatagtaatacatgtttatggtgtgtagtatatgtctatactagtagtaactatatagagaaagtaggaataaactatgtcacaagatgtaaatgaattaagtaagcaaccaacgccagataaagcagaagataacgcatttttcccatcaccatattcccttagtcaatatacagcacctataacagattttgatggtgttgaacacaaaggtgcctatatagatggtaaatggaaagtattgatgattgctgctgaagagagatatgtattattggaaaatggaaaaatgttctctacgggtaatcatcctgttgaaatgttattacctttacatcatttaatggaagcaggttttgacgttgatgttgcgacattatctggttatccagctaaattagaattatgggctatgccaactgaagacgaggcagttataagcacgtataataaattgaaagaaaaattaaaacagccaaaaaaattagcagatgtgattaaaaatgaattaggacctgattcagactatttatctgtctttatcccaggcggacatgctgcagttgttggtatttctgaaagtgaggacgttcaacaaacattagattgggcattagaaaatgaccgctttatagttacattatgtcatggaccagcagcactactttcagcagggcttaacagagaaaaatctccattagaaggatactctgtttgtgtcttccctgactcattagatgaaggtgcaaatattgaaataggttatttacctggacgcttgaaatggctagttgctgatttattaactaaacaaggtttaaaagtagttaacgacgatatgacaggaagaacgttaaaagatcgtaaattattaacaggtgacagtcctttagcttcaaatgaattaggaaaattagcagttaatgaaatgttaaatgcaatacaaaacaaataattaaatattaattagaggagccccatatgtaaatgtataagggctctttttttggcaaaatttaagtgatacttgtaaaatagaacctattatgagtatgatttaagaaaacgcttgcaaagataataaccgcaactagcgatatggaggaaacatgatgtcttatagcattggaattgattatggaactgcttcaggccgtgtgtttttaattaatacaactaacggtcaagtagtatcaaaatttgtgaaaccatatacacatggtgtcattgagagtgaattaaatggtttaaaaataccacatacatatgcacttcaaaatagtaatgattatttagaaattatggaagaaggaatatcatatatagtacgtgaatcaaaaatagatccagtcaatatagtaggtattggtatagactttacttcatctactattatttttactgacgaaaaccttaacccggtacataatttaaaacaatttaaaaacaatccacatgcgtatgtgaaactttggaaacatcatggtgcatataaagaagcagagaaattatatcaaactgctattgaaaataataataagtggttaggccattatggatataatgttagtagtgaatggatgattcccaaaataatggaagtcatgaatcgagcaccagaaattatggaaaaaacggcttatattatggaagcgggcgattggattgtaaataaattaactaataaaaatgtacggtcgaattgtggattaggtttcaaagcattttgggaagaagaaacagggtttcattatgatttgtttgataaaatagaccccaaattatcaaaagtaattcaagataaagtatctgcaccggttgttaatattggtgaagcagtagggaaactggatgataaaatggcacagaaattaggattatcaaaagacactatggtaagtccttttattattgatgcccatgctagtttattaggtattgggtctgaaaaagataaagaaatgactatggtgatgggaacaagcacatgccatcttatgttaaatgaaaagcaacatcaagtgccaggtatatcaggttctgtaaaaggagcaattattccagaattatttgcttatgaagcgggacaatcagcagtaggtgatttgtttgagtatgtcgctaagcaagcaccaaagtcatatgtagatgaagcagaaaacagaaatatgactgtatttgaattaatgaatgaaaagataaaacatcaaataccaggtgaaagtgggctcattgctcttgattggcataatggaaatcgaagtgtattaagtgatagcaatttaacaggttgtatctttggattaactttacaaactaagcatgaggatatttatagagcatatttagaagctacagcatttggtactaagatgattatgcaacagtatcaagattggcatatggaagtagaaaaggtatttgcatgtggcggtatacctaaaaagaatgctgttatgatggatatctatgcgaatgtactgaataaaaaactaattgttatggatagtgagtatgcaccagcaataggcgcagcaatattaggtgcagtcagtggtggcgcacataattcaattaatgatgcagttgatgctatgaaagagccaattttatacgaaattaatccagaagcggaaaaagtacaaaggtatgaaacattatttaaagcttataaggctttacatgatatccatggttataaaaaagctaatataatgaaagatattcagagtttaagagttgagggataaaaaatttaatttgacattaattagtaatattaaacgctataaattactaaaatcaattaatacaactagaatttccatttacagaaacatcagcaacatgtacatgtcatatatacaagaaagcgcttttatattataattattatgaaaatgaatattatgtccgcatgtggtggactatggttatatagaagagacaaaggagatatttctatgaaaaaaattatgattactggtgcattaggacaaattggtacagaattagttgttaagtgcagagaaatttatgggacagataatgttcttgctacagatattagggaacctgaagtagactcacctgtacaaaatggaccatttgaaatcttagacgtaacagatcgtgaccgcatgtttgagttagttagggactttgaagcggatagtctaatgcatatggcagcattattatcagcaactgctgagaaaaatccaattcttgcttgggatttaaatatgggtggattaatgaatgcattagaagctgcaagaacttataatttgcactttttcacaccaagttcaattggtgcatttggagactcaactcctaaagttaatacgccacaagtaacaattcagcaacctacgacaatgtatggtgtaaataaagtagctggagaattattgtgtcaatactatttcaaacgttttggtgtagatacaagaagtgttagattcccaggtttaatctcgcatgttaaagagccaggtggcggtactacagactatgcggttgaaatatacttcaaagcagtaagagaaggtcattatacaagcttcatagataaaggcacgtatatggatatgatgtatatggatgatgcaattgaagcaattattaaacttatggaagcagacgacgctaaattagaaactagaaatggttataatttgagcgcaatgagttttgatccagagatggtaaaagaagcaattcaagaatactatccaaatttcacattagattacgatgttgatcctattagacaaggtatcgctaatagttggccggattctattgatacaagctgttcacgtggcgaatggggatttgatcctaaatatgatttagcgagcatgactaaattaatgttagaagctattgaacaaaaagatactgttaaaaataataactaatcatttccattcactttaatacacggaatgatattttaaattactctttattttaataaactagtgcatgaattctaatattattcattatacatattgaattcgcgagcttagttcattttaaagtaaagagttttttgtatgtaaagtatattagtaaaacacagattacttgtctctatgaaaataatacgtttatactaaaagatatagtctttctagaaaatctgttaattaattttgaatttttagaaaatttattgaacagcaaaatatggattgttataatttaagttaaacaaattcttatacaatattattaggaggcaatcaccatgtcacaagcagttaaagttgaacgacgagaaacattaaaacaaaaaccaaatacatctcaactaggttttggtaaatattttactgattatatgttgagttatgattatgatgcagataaaggatggcatgatttgaagatagtaccttatggtcctattgaaatttcacctgctgcacaaggtgttcattatggtcaatcggtattcgaaggattaaaagcatataaaagagatggggaagttgcacttttccgtcctgaagaaaattttaagcgtcttaataactcgttagcacgcttagaaatgcctcaagtagacgaagcagaattgttagaggggctaaaacaattagttgatttagaaagagattggattcctgaaggggaaggtcaatcattatatattcgtccatttgtttttgcgacagaaggggcacttggcgttggtgcatcacatcagtataaattattaattattttatctccttcaggtgcatattatggtggtgaaactttaaaaccaactaaaatctatgtagaagatgaatatgtgcgtgctgttcgtggcggtgtaggctttgcgaaagttgcaggtaactatgcggcaagtttattagcacaaactaatgcaaataaattaggttatgaccaagtactatggcttgatggtgttgaacagaaatatatcgaagaagttggtagcatgaacattttcttcgttgaaaatggcaaagtaattacaccagagttgaatggcagtattttacctggtattacacgtaaatctattatcgaattagctaaaaacttagggtatgaagtcgaagagcgtcgcgtttcaatcgatgaattattcgaatcatatgataaaggtgagttaacagaagtatttggtagtggtactgcagcagttatttcacctgtaggtacattgagatatgaagatcgtgaaatcgttattaataataatgagactggtgaaattactcaaaaattatacgacgtctatactggtattcaaaatggtactttagaagataaaaatggttggagagtcgttgtaccaaaatattaataaaaattgaatatgatcatgaaaacaatatgtaaaagttaatcatgactaaatccctttcaatgaagcgaagcatggtaataaattaagtttacaatgtttattgttaagtattgaaggggatttcacttattattatatttaattcaatatttaaaaagaactatactacgagttcattttcaggggaataacgaacatcatagaatcagcataatacgaaataaataggagtattgatattaatggaatggatattatttgataaagatggtacgttaattgaatttgatagaagttgggaaaaaataggggtacgatttgtacaatcattgcttgagactttcccagtacataataaagaagctgctttaagacaactcggtgtcattaaagaatctattgatccaaaatcagtgatgggttcaggatctttacaacaaattattcaggcatttaatgatgtgacgggacaagatacaaccgactggtccaagtcaacaagtcaaaagttggtagatgaacgtattcctgaaattaattgggtagaaggtgttaaagaagcacttatcgatttgaaagcaaaaggctatcaactaggtattgttacgagtgatactaaaaaaggtgtagaacaatttttagcacataccaatgctacctcattgttcgatttgatcatttctaccgaagcggatgccaatgagaagccaaatcctaaagtattatcgcctttatttgagcaatataatgtagacccgcagaaagtagctatagtaggagacactgctaatgatatgaagacagcaagtaatgcaaatttaggtatggcaataggtgtattaacaggtattgcaacaaaagaagaattacatgaagctgatattattttaaatagtgcggcagatattttagaagctttaaattaaaaagtaagacatagtgtatatgtgaatcaatgtaaccaatagaattgataatgtaatcgatgatatctatggaatatacattgaatataaacatatacgctatgtctttagtcttttatcgtgtatctacttgtcgatatgtttgaataattcgagcgattttatcaatcataggatttaaagaatcaggatctttgtgtatatcatattcattaatgttgatacgtaccacaggacatgcattaaagctgttaatccaatcgtcataacgtttaaataactttttccaatattcaggatcagtatttatttccatttcgcgaccacgttcaataatacgatcaatgacctcatcataattacattctaaataaatcattacatcaggtttaggaaaataaggtgtcatgaccatggcattaaataagtctgaatatgttttgaaatcctctttactcattgtgccttcttcttcatgcatttttgcaaaaatatcaacatcttcataaattgatcgatcttggacaaagccaccaccatattcaaacatacgcttttgttctttaaagcgttcagctaagaaataaatttgtaaatggaaactccatcgttcaaaatcgctgtaaaatttatctaaatatggattatgttcgacattttcaaaagacgttttaaagtttaatttatctgcaagtgcttgcgttagtgttgattttccaacaccaactgtacctgcaatggttataatggcattttgtggaataccgtaattattcattggtaatatctcctatcataggtaatataatatgtaatatatcttcgtaatcttgttcatttttaagaaaatcaatagaagttgtatcgattaaaactacatttgaaccattactttgtaaggactcataatactcacgataatctttttttaactttaacagatattcatcttctatttgatgctcaaaactacggttacgtttagcaattctagattttaacacatcaaggtctgcatctaaaaagataatcatattcggcataatcatatcttcagttaaaatatcataaattttactaaatttctgaaattcaatagaactcaaggtatttttagcaaatatcttatttttatgtatatgataatcactaactacaccttgatttagttgtgttacatcttgaaattgcttatatctattgcataaaaagaacatttcagtttgaaaactccatttagagatatcttcataaaagtctgataaaaatggattttctgtgatgatttctttttcttcataaaaatctaaagtttgacttaatttgtgtgcaagtgaagatttacctacgccaataggaccttcaattgctataaaaggtttgttcatattcacatctccaaatgttaaaatagacattgagtattgtaccataagtgaggtatctggacataaatgacaaatgatatatattttatgacattagcgattgaagaagctaaaaaagctgctcggctaggcgaagtacctataggtgccgtcatcactaaaggtgatgaagttatcgctagagcacataatttaagagaaacactacaacaaccaacggcgcatgctgaacatattgcaattgaacgtgcagccaaagtgttaggtagttggcgtttagaaggttgcacattatatgtaaccttagaaccatgtgttatgtgcgcaggaacaattgtaatgagtcgcattccaagagtcgtctatggcgcagatgatcctaaaggtggttgtagtggcagtttaatgaatttattgcaacaatctaattttaatcatcgtgcaattgttgataaaggtgtacttaaagaagcatgtagcacattattaacaacattttttaaaaacttaagagccaataagaaatccaccaattagacgatagtacatactaattaaaatttgttagaattacattatatgataaattaatgacaatataaatgttaatagaaaagtatgtgcgctgagtatatattcttatttaagaacaagattttaaatttacgaaacgaggtaacataatgataaaactaatagccactgatatggatggcacgctacttaatgcagcacatgaaatttctcaacctaatattgatgcgattaaatacgctcaagaacaagggataacggttgttatcgcgacaggtcgagcattttatgaagcacaagcaccagttgctgacacagatttaacagtaccatatatttgtttgaatggtgctgaagtacgtgatgaaactttcaatgtaatgagcacttcacaccttaataaatcgttagtacacaaaattacaaatgttttaaaagatgcaggtatttattatcaagtatacacgagtcgtgcgatttatactgaagatccacaaagagatttagacatttacatagatattgctgagcgtgcaggtcaacacgcaaacgttgagcgtattaaaaatggtattcaaagacgcatagataatggtacgttgaaagttgttgataattatgatgctattaaaaacattcctggtgaattaattatgaaaatattagcatttgatggaaatttagaaaaaattgacaaagctagtaaaattttagctgaatctccgaatttagctatatcatcatcttcgagaggaaatatagaaataacgcattcagatgcacaaaaaggtattgcgctagaaacaattgccgaaagattagggattgaaatgaaagatgtcatggcaataggtgacaatttaaatgacgtatcaatgttagagaaagttggctatccagttgcgatggaaaatggtgctgaagaagttaaaaaaatagcaaaatatgtcacagatacgaatgaaaatagtggtgttggaaaagctattatgaaattattacgtgaacaacaagtttaataaaaaagaggggtcaaatatgaaaggattaattattattggcagtgcacaagtgaattcacatactagtgcactagcaagatacttaactgagcattttaaaacacatgatatagaagcggaaatattcgatttagcagaaaaaccattaaatcaattagatttttctggtacaacgccggctattgatgaaatcaaacaaaatatgaaagatttaaaagagaaagcaatggcggcggactttttaatattaggaacgccaaactatcatggttcatattctggaatattgaaaaatgcattagatcatctaaatatggattattttaaaatgaagccagtaggattaataggcaatagtggaggtattgtcagcgctgaaccgttatcacatttaagagttattgtcagaagtttattaggcattgcagtaccaactcaaattgcaacacatgattcagattttgctaaaaatgaagatggttcatattacttaaatgacagtgaattccaattacgtgcaagattatttgtcgatcaaattgtatcatttgcgcataatagtccatatgaacatttaaaataaattaaaaaacatgtaaatatacattgaaaataggtatgtagcttataaagcaaaacaattgctttgaagttacataccttttttattgattttgtgtttaattaagcttcgatttagaatttggatatttagcgtaactaaaagatgatttatcgaaatccgatttaaacatatatttaagttttttgtgaatagtatgagcgaacaatgttgtctataaattttagactataaaagaaaaagtatattaaaaattgctatctttaatatgtatcacgtaaaaattaattagtaaaataacattgtaaaataaaagaaaaaaattaaaacattgtactttatcgaaaagtgtattaagatagaaaggcagaaatttttatatgcaaaatattatatttatcaaattttgatattttaaaggagtattattaaatgaataataaaaagacagcaacaaatagaaaaggcatgataccaaatcgattaaacaaattttcgataagaaagtattctgtaggtactgcttcaattttagtggggacaacattgatttttgggttaagtggtcatgaagctaaagcggcagaacatacgaatggagaattaaatcaatcaaaaaatgaaacgacagttccaactgagaataaaacaactgaaaaagttgatagccgtcaacaaaataatattgaacaaagtacaacgtcaaaccaaccaaaagtaaatgagtctgataatacttcagttaaagaaactactgaagaacctcaaaatacaacttctacacaatcaactaaacaaaataacgatgcgacggcaaataaagataatttagaggctcaaaatatttcaacgcaggctaaagatgtttcagctactcccaaaacaacgactattaaaccaagaacattaaaccgtatggctgtgaacacagtagcagcaccacaacaaggtacaaatgttaatgataaagttcatttttcaaatattgatattgctattgataaaggacatgtcaattctacaacaggtaaaactgaattttgggcgacttctagtgatgttttaaaattaaaagcgaattacacaatcgatgattctgttaaagagggcgatacatttacatttaaatatggacagtatttccgtccgggttctgtaagattaccttcacaaactcaaaatttatataatgcccaaggtaatattattgcaaaaggtatttatgatagtacaacaaacacaacaacatatacttttacgaactatgtggatcaatatacaaatgttagcggtagctttgaacaagttgcatttgcgaaacgtgaaaatgcaacaactgataaaactgcttataaaatggaagtaactttaggtaatgatgcgtatagcgaagaaatcatcgtcgattatggtaataaaaaagcacaaccgcttatttcaagtacaaactatatcaataatgaagatttatcacgaaatatgactgtttatgtaaatcaacctaaaaatacatacacaaaagaaacatttgttagtactttaacaggttataaatttaatccagatgcaaaaaactttaaaatttatgaagtgacagatcaaaatcaatttgttgatagctttacacctgacacttcaaaacttaaagaggtaactaatcaatttaatattacttacagcaatgataataagactgcaactgtagatttattgaatggccaaacaagcagtaataaacaatacatcattcaacaagttgcttatccagataatacatcaacagataatggaaaaattgattatacattagaaacacaaaatggtaagagtagttggtcgaacagttattcaagtgtaaacggctcatcaactgctaatggcgaccaaaagaaatataatctaggtgactatgtttgggaagatacaaataaagatggtaaacaagatgccaatgaaaaagggattaaaggtgtttatgtcattcttaaagatagtaacggtaaagaattagatcgtactactactgatgaaaatggtaaatatcagtttacaggattgggaaatgggacttacagtgtagaattttcaacgccagcagggtacacaccaactactgcaaatgcaggaactgatgatgctgtagattctgatggactaactacaacaggtgtcattaaagacgctgacaacatgacattagatagtggattctacaaaatgcaaaaatatagtttaggtgattatgtttggtacgacagtaataaagatggtaaacaagattcgactgaaaaaggaattaaaggtgttaaagttactttgcaaaatgaaaaaggcgaagtaattggtacaactgaaacagatgaaaatggtaaatatcgttttgataatttagatagtggtaaatacaaagttatctttgaaaagcctgctggcttaactcaaacaggtacaaatacaactgaagatgataaagatgcagatggtggagaagtagacgtaacaattacggatcatgatgattttacacttgataacggatacttcgaagaagaaacatcagacagcgactcagattcagacagcgactcagattcagatagcgactcagactcagacagcgactcagattcagacagcgacttagactcagatagcgactcagattcagacagcgactcagactcagacagtgattcagattcggatagcgactcagattcagatagcgattcagattcggacagcgattcagactcagatagcgactcagattcagacagcgactcagactcagatagcgactcagactcagacagcgactcagactcagacagtgattcagactcagatagcgactcagactcagacagcgactcagattcagacagcgactcagatgcaggaaaacatagtcactcagataaaccaatgacagcgactcagaatcagaccatcacaataatgcaaaagcattaccagaaacaggtagtgaaaataacggctcaaataacgcaacgttatttggtggattattcgcggcattaggatcattattgttattcggtcgtcgtaaaaaacaaaataaataatatgaataactaagccaggtctttgtgacctggttttgtatttataaatacgaaaggtataaaacaaaagttgtaattcttaaatacaatttaatttaatgaaaaaagtaagtgaaaatgaattagaaaatcttaggtgtttattttgggtttggataatactatttttatgataattaaataaaatttacaaaactcataaaaaatcttatttaaacgcaaatgttaaataacgttttacgataaagaaaaataattaaagtattgtgctttatctaaaaatgtaatactatattgatatacatttttgtatttaaaacaattgtattatttaaaaatttgatgaattaggagtaatctaatgctaaacagagaaaataaaacggcaatgacaagaaaaggcatggtatccaatcgattaaataaattttcgattagaaagtacacagtgggaacagcatcaattttagtaggtacaacattaatttttggtatagggagccaagaagctaaagctgcagaagtaaccaacaaggaaatgaaggaagatgcaacatcagtaaataatgatcaagtatctaaaaaagttgatacagggcaactaaataatgacggtaatactagtaaagttgatacagagcaactaaaagatgagaatattaataaagttgctaatcaaaaagaagtaactagagtagaaaatagtgtcgcttcagaaaaaaataataactctcagccatctgaaaatggaaaattacaaacgtcggatgttaaaaaaactgaagctaataatacaactttagatgatcaagttactactacagttaattcacagcaattaaatactgataacacaacttcaaatgcaacaatgtcgtcagcaccaattaatgtaagtaaagatgacttaaaaattaataatgaagaagtaagaaatgtaggagaaaaaagcgataatgctgacaatgcaaatggttcagatgtgattatgccaaaaagtacagcacctaaacgtttgaatacaagaatgcgtatggcagcaatacaatcaacctcaacagattctaaaaatgttaatgatttaatcacatcaaatacaacattaactgtcgttgatgcagataatagtaaaactattgtacctgctcaagattatctatcattgaaatctcaaattacagttgatgacaaagttaaatcgggtgattatttcacaattaaatattcagatactgttcaagtatatggtttgaatccagaagatattaaaaatattggtgatataaaagatccaaataatggggaaacaattgcgactgcaaaacacgatactgcaaataatttaattacatatacatttacagattatgttgatcgatttaattcagtgaaaatgggaattaattactcagtttacatggatgcagatacaattcctgtagacaagaaagatgttccttttagtgtaactattggaaatcaaactacaactactacagcagatattacttatccggcttataaagaagctgataataattcaatagggtcagcttttacagaaacagtttctcatgcaggaaatgctgaagatcctggttattataaccaagtagtttatgtgaatcctatggataaagatttaaaaggggctaatttaaaagttgaagcgtatcatccgaaatatcccgctaatattggtcaaattaatcaaaacgttactaatataaaaatttatcgtgttcctgaaggatatacattgaataagggatacgacgttaatgctaatgatttagtagacgtaaccgatgaatttaaaaataaaatgacctatggaacaaatcaaagtgttaatatcgattttggtgatattacatcagcgtatgttgtaatggttaatacaaaattccaatatacaaatagtgaaagtccaacacttgttcaaatggctactttatcttctacaggtaataaaacagtttctactggtaatgctttaggattcactaataaccaaagtggcggcgctggtcaagaagtatataaaattggtaactacgtatgggaagatacaaataaaaacggtgttcaagaattaggagaaaaaggcgttggcaatgtaactgtaactgtatttgataataatacaaatacaaaagtaggagaagcagttactaaagaagatgggtcatacttgattccaaacttacctaatggagattaccgtgtagaattttcaaatttaccacaaggttatgaagtaaccccttcaaaacaaggtaataacgaagaattagattcaaacggtgtatcatcagttattacagttaatggcaaagataatttatctgctgacttaggtatttacaaacctaaatacaatctaggcgactatgtatgggaagatacaaataaaaatggtatccaagatcaagatgaaaaaggtatatctggcgtaacggtaacattaaaagatgaaaaaggtaacgtgttaaaaacagtaacaacagatgctgacggtaagtataaatttactgatttagataacggtaattataaagttgaatttactacaccagaaggctatacaccgactacagtaacatccggtagcgatattgaaaaagactctaatggtttaacaacaacaggtgttattaatggtgctgataacatgacattagatagtggattctacaaaacaccaaaatataatttaggtaattatgtatgggaagatacaaataaagatggtaagcaggattcaactgaaaaaggtatttcaggcgtaacagttacattgaaaaatgaaaacggtgaagttttacaaacaactaaaacagataaagatggtaaatatcaatttactggattagaaaatggaacatacaaagttgaattcgaaacaccatcaggttacacaccaacacaagtaggttcaggaactgatgaaggcatagattcaaatgggacatcaacaactggtgtcattaaagataaagataacgatactattgactctggtttctacaaaccgacttacaatttaggtgactatgtatgggaagatacaaataaaaacggtgttcaagataaagatgaaaagggcatttcaggtgtaacagttacgttaaaagatgaaaacgacaaagttttaaaaacagtaacaacagatgaaaatggtaaatatcaattcactgatttaaacaatggaacttataaagttgaattcgagacaccatcaggttatacaccaacttcagtaacttctggaaatgatactgaaaaagattctaatggtttaactacaacaggtgtcattaaagatgcagataacatgacattagatagtggattctacaaaacgccaaaatatagtttaggtgattatgtttggtacgacagtaataaagatggtaaacaagattcgactgaaaaaggaattaaaggtgttaaagttactttgcaaaatgaaaaaggcgaagtaattggtacaactgaaacagatgaaaatggtaaataccgctttgataatttagatagtggtaaatacaaagttatctttgaaaagcctgctggcttaactcaaacaggtacaaatacaactgaagatgataaagatgcagatggtggcgaagttgatgtaacaattacggatcatgatgatttcacacttgataacggatacttcgaagaagagacatcagatagcgactcagactcagacagtgattcagattcggacagcgactcagattcagacagcgactcagactcggatagtgattcagattcagatagcgactcagattcagacagcgactcagactcggatagtgattcagactcagacagtgactcagactcagattcagatagcgattcagactcagacagcgattcagactcagatagtgattcagattcagacagcgactcagattcagatagcgactcagattcagacagcgactcagattcagacagcgactcagactcagacagtgattcagactcagatagtgattcagattcagatagcgactcagattcagacagtgattcagactcagacagcgattcggactcagacagtgactcagattcagacagtgattcggactcagatagcgattcagactcagatagcgactcagattcagacagcgactcagactcggatagcgactcagattcagatagcgattcagactcagacagtgattcagactcagacagcgactcagattcagatagcgattcggattcagatagtgactcagattcagacagcgactcagattcagacagtgattcggactcagactcagacagcgattcagattcagatgcaggaaaacatacacctgtgaaacctatgagtgctactaaagaccatcaaaataaagcaaaagcattaccagaaacaggtagtgaaaataacggctcaaataacgcaacgctatttggcggattattcgcagtattaggttcattattgttatttggtcgtcgtaaaaaacagaataaataatttgcttaaccaaaccaggtccgtgaggcctggtttttttatttcaaaatttatgaaatgtatcttatgtttgagattaaatagtgcaatattttaaaagatataacatacatcaacataaatttaattcatctttacattaaaagtacagacaaataagaaaagcaattaaacacagtttcaaaccatttaaaacaattagtataaaaatcaaatagataattaaaaatcaataaaattaagttattcaaaccaaagtgtaaaataacagttgaaaataaataaatttatttaaagtattgtgctttatctaaaaatgtattacaatgggaatacaaatttttatatgtaaaaatattagttttttgcaaatattgatattttaaaggagatttatatgattaacagggataacaaaaaggcaataacaaaaaagggtatgatttcgaatcgcttaaacaaattctcgattagaaagtatactgtaggaactgcatcgattttagtaggtacgacattgatttttggtctagggaaccaagaagctaaagctgctgaaaacactagtacagaaaatgctaagcaagatgaggcatcggctagtgataatgaagaagtagtgtcagaaactgaaaataattcgacaacagaaaatacttcaacaaatccaattaagaaagaaacaaatactgattcacaaccagaaactaaagaagaatcaactacatcaagtactcaaaaacagcaaaataacgttacagctacaactgaaactaagcctcaaaacattgaaaaagaaaatgttaaaccttcaactgataaaactgcgacagaagatacatctgttattttagaagagaagaaagcaccaaataatacaaataacgatgtaactacaaaaccatctacaagtgaaattcaaacaaaaccaactacacctcaagaatctacaaatattgaaaattcacaaccgcaaccaacgccttcaaaagtagacaatcaagttacagatgcaactaatccaaaagaaccagtaaatgtgtcaaaagaagaacttaaaaataatcctgagaaattaaaagaattagttagaaatgatagcaatacagatcgttcaactaaaccagttgctacagctccaacaagtgttgcaccaaaacgtttaaacgctaaaatgcgctttgcagttgcacaaccagcagcagttgcttcaaacaatgttaatgatttaatcaaagtgacgaagcaaacaatcaaagttggcgatggtaaggatgatgtagttgctgcacatgatggcgaagaaattgaatatgactcagaatttacaattgataataaggtcaaagccggcgatacaatgacaattaattatgataagaatgtaattccttcggatttaacagataaaaatgatcctatcgatattactgatccatcaggagaggtcattgctaaaggaacatttgataaagcaactaagcaaatcacatatacatttacagactatgtagataaatatgaagatataaaatcacgcttaactctatattcgtatattgataaaaaaacagttccaaatgagacaagtttgaatttaacatttgctacagcaggtaaagaaacaagccaaaatgtcactgttgattatcaagatccaatggttcatggtgattcaaacattcaatctatctttacaaaattagatgaagataagcaaaatattgaacaacaaatttatgttaatcctttgaaaaaaacagcaactaacactaaagttgatatagctggtagtcaagtagatgattatggaaatattaaactaggaaatggtagcaccattattgaccaaaatacagaaataaaggtttataaagttaactctaatcaacaattgcctcaaagtaatagaatctatgattttagtcaatacgaagatgtaacaagtcaatttgataataaaaaatcatttagtaataatgtagcaacattggattttggtaatattgattcagcctatattattaaagtagttagtaaatatacacctacttctgatgatgagctagatattgctcaaggtgctagtatgagaacaactgataaaaataattattataattatgcaggatattcaaacttcatcgtaacttctactgacactggtggtggtgacggtactgttaaacctgaagaaaagttatataaaattggtgactatgtatgggaagacgttgataaagacggtgttcaaggtacagattcgaaagaaaagccaatggcaaacgttttagttacattaacttacccagacggtacaacaaaatcagtaagaacagatgctaacggtcattacgaattcggtggtttgaaagacggagaaacttatacagttaaattcgaaacgccagctggatatcttccaacaaaagaaaatggaacaactgatggtgaaaaagactcaaatggtagttctgtaactgttaaaattaatggtaaagatgatatgtctttagacactggtttttataaagaacctaaatataatcttggtgactatgtatgggaagatacaaataaagatggtattcaagatgctaatgagccaggtatcaaagatgttaaagttacgttaaaagatagtactggaaaaataattggtacaacaactacagatgcatcaggtaaatataaatttactgatttagataatggtaattatactgttgaattcgaaactccagctggttatacaccaacacttaaaaatactactgctgaagataaagattctaatggtttaacaacaacaggtgttattaaagatgcagataatatgacattagacagtggtttctataaaacaccaaaatacagtttaggtgattatgtttggtacgacagtaataaagacggcaaacaagattcaactgaaaaaggtatcaaagatgtgacagttacattgcaaaacgaaaaaggcgaagtaattggaacaactaaaacagatgaaaatggtaaatatcgtttcgataatttagatagcggtaaatataaagttatttttgaaaagcctgctggcttaacacaaacaggtacaaatacaactgaagatgataaagatgcagatggtggagaagtagatgtaacaattacagatcatgatgattttacaatagacaacggttacttcgaagaagatacatcagatagcgattcagattcagatagcgactcagattcagatagcgattcagattcagacagcgattcggactcagacagtgactcagatagcgactcagactcagatagcgactcagattcagacagtgattcagactcagatagcgactcagactcagacagtgactcagattcagatagcgactcagactcagacagtgactcagattcagatagcgattcagactcagatagcgactcagactcagacagtgactcagattcagatagcgattcagattcagacagcgattcggactcagatagcgattcagactcagatagcgattcagattcagacagcgattcggactcagatagcgactcagattcagatagcgactcagattcagatagtgattcagattcagacagcgactcagactcagatagcgactcagattcagatacaggaaaacatatacctgttaaaccaatgagtgctactaaagaccatgacaataaagcaaaagcattaccagaaacaggtagtgaaaataacggctcaaataacgcaacgttatttggtggattattcgcagcattaggttcattattgttattcggtcgtcgcaaaaaacaaaacaaataatacaatatgacccaggtccttgtggcctggtttttttatgattacacatgcaatagatgtatttttcatataaaataaacaataaagatacggaataaaacttatatgaggcgataatatgaattacattttaggaacaattttagaaagtaaaattacaggtgtagaaaaagcgcaaataaatagactgaagttgttcaaacaacacggcatatcttcaaaatgtgtatatgttaaatggaatccttattcatacacatatgcgaagcaacatcagattgaaaatgatctgtttacaatgtatgactattttcaaaaagcaatcaattataaaaagacaaagcaagttaactggatacagtattgggaaaagtcatgtaggtacacattgaaatttgtggaaaattcaaatgatgtcagaatatatgatgaagagcaatttataatgtatgctcattttttagataaacagtatcatcaattaaactatgtgaattattttgatcaacaaagaagaaaaattaaacgcgaattgtatgatggaagaggctttttaagttgctctcgaattttaggtgaaggacaacggattgtactcgaaaattactatacacctaatggggaaatcgtcatccaaaaatatttcgacgatataaaagggaaaaccacgctcacaaaggttatcttaaatgaagaccagcatcaacaattttttgatacagaagatgaattagttcaatattttctccatcaattatgtaaaaataatgatcaaatcatattagaccgtcctcatgaattaggaaatgttattgcgggattaaatcaaagtattccagttattgttgtgctccacagtacacatttatccggcaccggtaatgatataaaaagtttttataaaacagtgtttaataatttaacacgttataaagcgattgttgtatcaacagaaaagcaatgccaagatatttcacaatatattgaaaataaaataccagttatcaatattccggttggctacgtggcaaacttaaagtatcaatttgacagcaatcaaaaggataaaaatcatatcatatcaattgctcgcctcgttgaaaataaacaaattaaacatcaaattgaagtgatcaagcaattagtaacaaaacatcccaatattcaattgaatatttatggacatggaaatggtttgttagaatatcgacaacttgtagaagattatcatttatcggaacatgttaaatttcatggttttaagacgcatattaatgaagagattgctaaagcagaactgatgttatcgacaagtaaaatggaaggttttggattagcaattttagagtcgctttcattaggtacaccagtgatcagttatgatgtagattatgggccatcagaactgattcaagatggatttaatggctatttagtacctccaggtgacatcaatcaaatggttgaaaaggttgaccaattattaaataatagccaaatgatgcaacaattttcaattaatagcatagaatctgcacaacagtacaatgcaactactatcagtataaagtggcaaaatattttaaactaagtcaaaagaaaaaagcattttcctaaaatcatctatttaacaatccacgttcataagaactgacaaagtttgttaaatgacataggaaaatgctttttttataaaaataaaggtaaagtacatttatattagacgaacaaattggtcccattgtttaattaacgacgctttactatattgttgcgcttttgccaaactaccttttgacagtcgttgttgtacttcaggatgatcaatcacatattttactttatcaaatagggcatcttcatcatttttagtaattaaataaccattgaaatctgaagtgattaattcaccaggaccatatttaatatcataactaataactggaacaccatgtgctaaagattcaagtagcgctaacgagaaaccttccatgttactcgttattaaactcaaataggcatcgctatattcttggtctagattgcttaaaaagccgcgtaagtaaacatgattttccaatccatatttttgtatcaattcatttaattttttactttcagaaccaaaaccatacatatgaagctctatttttgggacataagatactaagcgtctaattaattcaatttgttgatgcaattgtttttcaggtgaataacgagcaacggaaattaatttaacactgcgctgatctaatgtttggactggtgtatcaattgtttcactatagccgacaggaatattaataactggaatagtatggttaatacgtttttcaacatctaatttttgctgctcagtagaaacgataattgcacgatatcgagataaattttcaaacatcgctttgtagacatttttaaatggcgatgaatctaatgcatcaatatttttaatgtgtgtactgtgaagcacagctactactgggattgactcaggtgttaagttgaaaataggtgctgtatacacattacggtcactgaaaaataaatccccatgttgatatagttgtttaatgaaaaatgcgcctaattccgtttcattattaaagaaatattgtttgttagcatagtaaacaataattttttgtacttctggtttgccatctttgtaagaaaaatacttttctaattttgtgtcgccttctggattatagaaaaattcacataatgtttgttgtttatcaacaagaatcctactacaacttaaaaagccacgcacatcataaaaatcacgttttacttttcgtctttgactatcaaaatgattcacataatctaatatacgatatttaggatcttgaaaatgggcatacattaagaaacgctcttgatcatatattctaaagtcatgactattttcaacatgttttaaagtataatgacattcatcagtccaatatgacaaccagtcaaatggttcattgcgttctaaatatgttgcttcttggaagaaatcatacatattaatatagtcagaactagtgatataattttgggcatttctatataaatatctattccatgacagaaatacacattgtgctggtcttcccatttctttaaataaatttaaacgattaataattgctttctctatcccagttaaattaacacctaaactattacctacaaaataattcatttacaacaccacttatatctattttttataattatatcacataatatttaattacttcttttaactggaagatgtgtttatttataaaacaacaagttttgatatttataatggtagtagttattcagtcaactacgaccaatatatcattgtagagcttaggaatttgatttatgactcaggcacatcaaatgaatagatttataaaagagttatacaactctaggaggtatagtaaaaacgcgcaactactgttacgcgtttgaattaatcatatgatattatttgcgatactttaatttagcgaaagcatcatgttgatggatagactcttcattacgacattcgatatcgaaaccgtctaaccaatcaaattcaactaagtccgcggcaattaaacgaattaagtcttcgacaaaacgtggattttcatatgcacgctctgtcacacgtttttcatcaggacgttttaaaatagggtatagaattgaacttgcattagcttccattgcatctaaaattttgtttttatagtcatcaactatgtcttgatctttattaatatatgttttaacagtgacaacaccacgttggttgtgcgctgaatattcacttatttcttttgaacaagggcatagcgttgtgacagttgcttcaatagtaagttctttacgtgtaactttatcaccgtcaattgctaatccataagtgacatcggcattaccaactgctttaatatttgtggttggactatagcgatcaaagaaccatttcccagaaacatcaacgcctgccgcattttgtttcatattcgtttgtaaagtgcgtaacacctgataaagtgtattaaattcaagttcaataccattatcatagtgcttttcaacactttcaataatacggctcatattaatacctttttcgtcttttgttaaacttgttgaaaaactaaatgtgccagctgtttgatactggtcaacaagtacagggtacactaagtttttaataccaacttcttctatttcaaataagaaatctttatgtgtactttgtaaatctgtcatttcgttcttagtagtaggtttcgtgccttcaataggatctacggaaccaaagtgtttccaacgaccttctcgtgtcgataaatcaaattcagtcatttttttcctccgttaagatttaaagtgatatgtccaatatggttcgactgttaaaaagctgtgttgtttaccatcgatttcaggacttgctaattgttttaaaaatggacctgtttgagaagcatgtgcttcaaatgccttaattttaagttctttaaaatctgtaatatcattttggatatcaggttctccaagtgcttcggttgcatcattactgaatgcaactaaagttaaacgagggcgttcttctttaggcatgcgttcaaccgttcgaattacagcgtctgctgttgcttcgtgatcagggtgtactgcatatccagggtaaaatgaaataatcaatgatggatttgtatcatcgattaaagatttaatcataccatctatatgttcatagggttcaaattcgacagttttgtcacgtaaacccatttttcttaaatcagtaataccaataactttacaagcttcttctagttcacgctcacgaatagttggtaatgattcgcgtgttgcaaatgggggattacctaaatttctgcccatttgtcctagggttaaacatgcatatgttacaggtatgccttgttggatataacttgctaatgtgcctgcagatgagaaggtttcatcatcaggatgtggaaatattactaatacatgtctttcgtcagtcatgttgatgcctcctctataaattaaatggtcgctcactaatttgaagtgctgcagcgagttgaccttcgtaattaaaacctgcaattaaaaattcatcatgctcattgatctcaaaatgcgttagaccttgtacataaacccaaccaccatttgatagtttaagaccaatgcgataaggttctttattaccaccttttagttgtgcatgcgtatatgttacttgtatgtttcttaaaaaagtaccagcattaaaaacacgttgatcgaaatggttcgcataggccccatttgtcgtttcaacatgcagatacacaggtttatgttcaaaagaagcaagtaaatctataacttcttgttctttaattggttccaacacgttcactccttacactatcaatgtgtttatctttctattttactaaaaactattcaataattgtatacgattgctcaattatttataaattaattttcatgaagggtaattactcaggattacgtaatcatacagcattagttttttacttttaaaaatcaaaaaaaatgttggaatttaaaaagtgttaaacattaaaaatgatgctatattaatggtgtatgaatgaattcataagtttttaaaatgtattaaatttgtggaggcatgtaaacaatgaaagtattaaacttaggatcgaaaaaacaagcatcattctatgttgcatgtgagttatataaagagatggcatttaatcagcactgtaaactaggtttagcaactggtggtacaatgacagatttgtatgaacaacttgttaagttattaaataaaaatcagttaaacgtagataatgtatccacgtttaatttagacgaatatgtaggtttaaccgcatcacatccgcaaagttatcactattatatggatgacatgcttttcaaacaatatccttattttaatagaaagaacattcatattccgaatggagatgccgatgatttgaatgcggaagcgtcaacttataatgacgttttagaacaacaaggtcaacgtgatattcaaattttaggtattggtgaaaatggtcatattggatttaatgaacctggtacgccgtttgatagcgttactcatatcgttgatttgactgaaagtactattaaggctaatagtcgatattttgaaaacgaagatgatgttccaaagcaagccatttcgatgggactagctaatattcttcaagctaaacgtatcattttactcgcatttggtgaaaagaaacgtgctgctattacacatttattaaatcaggaaatttctgttgatgttccagccacattacttcacaaacacccgaatgttgagatatatttagacgacgaagcttgcccgaaaaatgttgcgaaaattcatgtcgatgaaatggattgattgcaatgtttaattaagaaatgcctcgggaaaggttccaatagaaagataaaaagcattggaaggatgatttttagtggaattacaattagcaattgatttattaaacaaagaagacgcggctgagttagcaaataaagtaaaagattatgtagatatcgtagaaatcggtacgccaatcatttacaacgaaggtttaccagcagttaaacatatggcagacaacattagtaatgtaaaagtattagcagacatgaaaattatggatgcagctgattatgaagttagccaagcaattaaatttggcgcggatgtaattacaatactaggtgttgcagaagatgcatcaattaaagcagctattgaagaagctcataaaaataataaacaattactagttgatatgattgctgttcaagatttagaaaaacgtgcaaaagaactagatgaaatgggtgcggattatattgcagtacacactggttatgatttacaagcagaagggcaatcaccattagaaagtttaagaaccgttaaatctgttattaaaaattctaaagttgcagtagcaggtggaattaaaccagatacaattaaagaaattgtcgctgaaagtcctgatcttgttattgttggtggcggaatcgcaaatgcagatgatccagtagaagctgcaaaacaatgtcgcgctgcaatcgaaggtaagtaatatggctaaatttagtgactatcaattaattctagatgaattaaagatgactttgtcacatgttgaagcggatgagttttcaacgtttgcgtccaaaatactacatgctgaacatatatttgtagctggcaaaggacgttcaggattcgtggcgaatagttttgcaatgcgcttaaatcagctcggcaaacaggcacatgttgttggagaatcaacgacacctgcgattaagtcgaatgatgtatttgtaattatctctggttcaggttccacggaacatttaagattattagcagacaaagcaaaatcagtaggtgctgacatcgtattaattactacaaataaagattctgcaataggcaatctagctgggacgaacatcgttttgcctgcaggtacaaaatatgatgaacaaggttcggcacaaccattaggaagtttgtttgaacaagcatcacaattatttttagatagtgttgtaatgggattgatgactgaaatgaatgttacggaacaaacaatgcaacaaaatcatgctaatttagaataaataaaagatagtcgataatattatgccattgagataatattatcgattatttttttatttaaatattaaattatagtataatgtcattaacaaacgaacgggagtgttaatagtgaagtttgacaattatatttttgatttcgatggtacattagcagacacgaaaaaatgtggtgaagtagctacacaaagtgcatttaaagcatgtggcttaacggaaccatcatctaaagaaataacgcattatatgggaatacctattgaagaatcatttttaaaattagcagaccgaccattagatgaagcagcattagcaaagttaatcgatacatttagacatacatatcaatctattgaaaaggactatatttatgaatttgcgggtataactgaagccattacaagtttgtataaccaagggaaaaaacttttcgtggtgtctagtaagaagagtgatgtattagaaagaaatttatcggctatagggttaaatcatttaatcactgaagctgttggatccgatcaagtaagtgcatataaaccaaaccctgaaggcatacatacaattgtgcaacgctacaatttaaatagcaaacaaacggtgtatattggggattcaacgtttgatgttgagatggcgcaacatgctggtgtaccatctgcagcagtaacatggggtgcacatgatgcaagatcattacttcactctaatccggattttattattaatgatccatcagaaattaataccgtattataaaatttgttaaaacagagaataccatggttaaaatccatatttataaatattagattatacatagaaatatttcgctttagattaggaatttaaaataaatatttattaataatcgtgtatgtttaaatagaaaagtctgcgtaattaattatttgatattaatacaaataactccgactgatgacatattacttgcagtcaattgtatatcttactttaaatacgatgtcgaaaatggcgatagcatatgacttatatgaagttgtatgctatcgctatttttagttataattccaaaaagttaatcgttcgatgatttaagaattattattgtttaattcaaatgtacgagggtataaaatcattgaatttaattcgataaagtgaaatttttgaacaaacatacttttgtatttatataaaagtttaaattcttataaatttgacaaaactaattaactccgtataattatgaaacatacaagagggagtgtatgaattcatggattttaataaagagaatattaacatggtggatgcaaagaaagctaaaaagactgttgttgcaaccggtatcggtaatgcaatggaatggtttgattttggtgtctatgcatatacaactgcgtacattggagcgaacttcttctctccagtagagagtgcagacattcgacaaatgttgactttcgcagcattagccattgcgtttttattaaggccaattggtggtgtcgtatttggtattattggtgacaaatatggacgtaaagttgtattaacatcaacaattattttaatggcattttcaacattaaccattggattattaccaagttatgatcaaattggactttgggcaccaatactattattacttgcacgagtactacaaggattttcaacaggtggagagtatgcgggggcaatgacatatgtagccgaatcatctccagataagcgtcgtaactcattaggtagtggattagaaatagggacattatcaggttatatagctgcgtcaattatgattgccttactcactttcttcttaactgatgaacaaatggcatcatttggttggagaatcccattcttacttggtttattcctaggattattcggcttatatttacgtcgtaagcttgaagaatcaccagttttcgaaaatgatgttgcaacacaaccagaacgagacaacattaactttttacaaatcatcagattttattacaaagatatatttgtgtgttttgtagctgttgtattcttcaatgttacgaactatatggtaaccgcatacttaccaacttacctagaacaagttattaaactagatgcaacgacaactagtgtattaattacttgtgttatggcaataatgattccattagcattaatgtttggtaagttagcggataaaataggtgaaaagaaagtatttctaatcggtactggcgggttaacattatttagtatcatcgcatttatgttattacattcacaatcatttgttgtgatagtcatcggtatatttatattaggatttttcttatcaacttacgaagcaacaatgccagggtcgttaccaacgatgttttacagtcatataagatatcgaactttatcagtaacatttaatatctctgtttcgatatttggtggtacgacgccattagttgcaacatggttagtcgcgaaaactggtgatccattagcacctgcgtattatttaacagcaatcagtgttattgggtttttagtgatcacattcttacatttaagtacagcaggaaaatctctcaaaggttcatatccaaatgtagataacgagcaagatagagcttattatgcagaacacccaaaagaagcattatggtgggttaaagaacgtaaagattagagatttcagtaaataagtaataatcaatcgtataaaagcactttaaagctagtaaacgctactaactttaaagtgctttttaaattagggaatgtaattagccgaaataaagtttttgtatatacataaacccccactgcaatgattatcgcaatgggggaaagaggggacttaaagcatatgtttagctttgaatacttaaaattctcttgctattgaaatgttaggatgtaaatatgtcttagagtattttgtccaacgcaattaatattgagactctaaccttcaatattattatagagaacacaaacttaaatagattgggtgacttatttgtgtcagttattgcgattgcgataacttcttttctctatatacatatagtaacgtcttatctaataaaaaacatggtactacagtatcaaatttatctagggcttaagtttgatttttataataggcaggtttacctgataaaaatactcattcattatataatgttaacaagatgtattttaaagtttacatttagtgagggatattgatgaacgtaattttagaacagttgaaaacacatactcaaaataaacctaatgacatagcattacatatcgatgatgaaacaattacatatagtcaactaaatgcccgcatcacttgcgcagttgaatctttgcagaaatattcacttaaccctgtcgttgctattaatatgaaatcaccggtgcaaagtattatttgttatttagctttgcatcgtttacataaagtgcctatgatgatggaaggtaaatggcaaagtactatacatcgtcaattgattgaaaaatatggtattaaagatgtaattgaagatacaggtctcatgcagagtatagactcaccgatgtttattgattcaacgcaattacagcactaccccaatttattacatattggttttacttcagggacaactggactgccaaaagcatattatcgtgatgaagattcatggttgacttcttttgaagttaatgaaatgttgatgttaaaaaatgaaaatgccatagtagcccccggaccactatcgcactcgttaacattatatgcgttattgtttgctttaagttccggtcgtacttttataggacagaccacttttcatcctgaaaagttacttaatcaatgtcgtaaattatcatcatacaaagttgctatgtttcttgttccaacgatgattaaatcattattgttagtttacaacaatgaacatacaatccaatcattttttagcagtggagataagttgcattcttctatttttaaaaagataaaaaatcaagcaaatgacataaatttgattgaattttttggtacatcggaaaccagttttatcagctataacttgaatcagcaagcaccagttgaatcagtaggtgtgctatttccaaatgtggaattgaaaacaaagaatcacgatcacaatggtataggaactatttgtataaaaagtaatatgatgtttagtggctatgtaagcgaacaatgtataaataatgatgaatggtttgttactaatgataatggctatgtaaaagagcagtatttatatttaacgggccgacaacatgatatgttaatcattggtggtcaaaatatatatccagcaaatgttgaacaccttttaacgcaatcgtcgagcattgatgaagcaattataattggtattccaaataagcgttttggtcaaataggcgtattgctttattctggtgatgtgacacttacacataaaaatgtaaaacaatttttaaaaaagaaagtgaaacgctatgaaattccatcgatgattcatcatgtagaaaagatgtattacactgcaagtggtaaaattgctagagaaaaaatgatgtcgatgtatttgagaggtgaattataatatgaatcaagcagtcatagttgcaactaaacgaactgcatttgggaaatatggtggcactttaaaacatttagagccagaacaattgctcaaacctttattccaacattttaaagagaagtatccagaggtaatatctaaaatagatgatgtagttttaggtaatgttgttgggaatggtggcaatattgcaagaaaatcattgcttgaagcggggcttaaagattcaatacctggcgtcacaatcgatcggcaatgtgggtctggacttgaaagtgttcaatatgcatgtcgcatgattcaagccggggctggaaaggtatatattgcaggcggtgttgaaagtacaagtcgagcaccttggaaaatcaaacgaccgcattctgtgtacgaaacagcattacctgagttttatgagcgtgcatcatttgcacctgaaatgagcgacccatcaatgattcaaggtgctgaaaatgtagccaagatgtatgatgtttcaagagaattacaagatgaatttgcttatcgaagtcatcaattgacagcggaaaatgtaaagaatggaaatatttctcaggaaatattacctataaccgttaaaggaggaatattcaacactgatgaaagtctaaaatcacatattccgaaagataactttggccgatttaagcccgtaatcaaaggcgggaccgttaccgctgcgaatagttgtatgaaaaatgatggtgcagttttattgcttattatggaaaaagataaggcatacgaattaggtttcaatcatggtttattatttaaagatggtgttacggtaggtgttgattctaatttacctggcattggtccagtaccagccatttccaacttactaaaaagaaatcaattaacgatagaaaatattgaagtcattgaaattaacgaagcgttcagtgcacaggtgattgcctgccaacaagctttaaatatttcaaatacgcaattaaatatatggggtggtgcattagcatcaggtcatccatacggtgcaagcggtgcccaattagtgacgcgattattttatatgtttgacaaagagactatgattgcatctatggggattgggggaggtctaggaaatgcagcattatttactcgattctaaccagcgattaaatgtgtcattttctaaggatagtgtggctgcatattatcagtgttttaaccaaccttatagaaaagaagtaccaccattaatgtgtgcgtcattatggtcaaaatttgatttatttaaaaaatatgcaaatagcgaactgattttaataaaatcagcaattaatcaaacgcaaaagatagaagtagacacaatatatgtaggacatttagaagatattgaatgccgacagattcgcaatatcacacgttatacaatggctttaacattaactaaaaatgatcaacatgtcataacggttacacaaacttttattaaggcgatgaagtagagatgaagtttaatgagatatggataaatgaatatttggcgctcgtaaatgatgataatccaatacataatgagattgtgccaggacaattagtgagtcaaatgatgctgatggctatgtcattagaggcggaccagtgtcaaattaattacgttaaacctattttaataaatgaaaatatcgaattcattgaacaacacgagcaagaaattatagcaattaatgacgatggagagattaaaataaagatttctttgagcacaaaaaaataaccgatattagctgcatgaacgcatattaattaggagatgaaaggacagctaatatcagttatgtattgttattattattggaaacagagataaatataggttacgcttctttctttgcacggggatgcattaatctaaaataataataacaactatatcaatgtttaataaattctggattattggaacgattagtcaatttaactaactttcatatgatctatatcgtcttgtaataaagagagcaatttgaatatttcagtatcactaaatgaatcgtcacatttaattgaaacatgctgaaacgttttggttataatttcataaactggtgcgccttcatggtgatactgtcgataaataatcataacctatattacctcctttgctactctatggttatattataaataacatttttatgtgtgacatcaaccttaagtatcaactttttatcagacatagaacgtataatttactaagactatttatgtatcatgttttaaaaggaatatatttttataaagtcgttgagaagttatttttaatttcaaaaaaaatagcagaattagtagagcggaataaaacgttatgtttaaacatgggcataataaagttccgaaaagatttggattgataggataactgattcgtgacactgtaactgaatattatatacatatgttgaaataaaactacctataacgatgacttacaatacttttttgcccaatttaactgtggagatcaaacaagtatttaataactaaaataaccacaccgaaagtgactttattgtgtactgagccccaaagttagtctttgaaagctaactttactggcgcacagcaatgacaatcaaatcataaggtgtggttaatctattttttatgaacgaagcattaaacctctgttacttcaacatcgatatgttcaatgcggttgtatgcaccgtgatccacaggaccaacaaaatcattcattttccaaccgtttttaatagcagaagcgacgaaagctttcgcgctaatcacagcttctttcggtgacttaccgttagctaaatatgcagttgttgccgcagcaaatgtacaaccagcaccatggttataactttgttggaacatgtctgtagttagttgataaaatgtttgaccatcatagtataagtcatacgatttatcttgatctaaagctttgccacctttaatgatgacatgctgcgcgcctttatcaaagataattgttgcagcctttttcatatcttcaattgaatttaatttacctaatcctgataattgacctgcttcaaataagtttggtgtcactaccgttgctttaggtagtaaatatttaatcatcgcctcagtatttccagggttaagcacttcatcttcgcctttacaaaccatgacaggatctactacaaagtattgtgcattagatgcctcatatacttctccagcacgtttgattatctcctcagtacctaacatacctgttttaatagcatcaggtccgattgataaagccgtttcaagttgcttttcaaatacgtccataggtaatggtgtgacatcgtgtgaccatgtatctttatccatagtaacgatggcagttaaagcgaccatgccatacgtatctaattcttggaacgttttcaaatctgcttgcatacctgcgccagcacttgtgtcagaaccggcaattgttaaaactttctttaaagccattgagcttcactcctacataataatattgtattcatcatatcatttttaacctaattgaaaaatattaagcattcaatatttgatgattgttgaaatgaatcattcatactattgtaacttttgaaaatgtcattcactttagataagtgtgatatgttaaaatatgtcctgaggtgagattgaatggaatggtcgcaaatttttcatgacataacaacgaaacatgactttaaagctatgcatgattttttagaaaaagaatattcgactgcaatcgtataccctgatagggaaaatatatatcaagcgtttgatttaacaccgtttgaaaatatcaaagttgttatattaggacaagacccgtatcatggtccaaaccaagcacatggattagcattttcagtgcaacctaacgcaaaattccctccatctttacgaaatatgtataaagaattagcagatgatattggatgtgttagacaaacaccacatttacaagattgggcaagagaaggcgtcttgttattgaatacagttttaaccgtaagacagggtgaagcaaattctcatcgtgatattggttgggaaacatttactgatgaaattattaaagcagtgtctgattataaagaacatgttgtctttattttgtgggggaaacctgcacagcaaaaaataaagcttatcgatacatctaaacattgtattataaaatcagtgcatcctagtccactgtctgcatatagaggattctttggatcaaaaccgtattccaaagcgaatacctatttagagtcagtaggaaaatcaccaattaattggtgtgaaagtgaggcgtagatggtgaatagagaaactttaatagcacgaattgagcaagaattagtacaagcagagcaggcgcagcatgaccatgactttgaaaaacatatgtatgccatacatatattaacatctttatatgcttcaacatcaaatacatcacatattggtgaacaacaaatgaatcatcgtattgctaaccataatcaaatgccacattcacaaattacgcagtcaacacatcaagtgacagctgctgaaattgaagcgatgggtggtaaagtaaatacgcattcagcacatcatcataataagtcatattcacaaccttcaaaccaacaacaaagattagcgacagatgatgacattggcaatggtgaatccatatttgatttttaaaaagcaacaatgaaacataattacttaatagcttattaagtatgtaggttaataatcaagacgtatatacttttattcgagtgttcggatttaaacatttattaatactgaattatataaggagaggtagcaatgaaattatttattattttaggtgcattaaacgcgatgatggctgtcggaacaggtgcatttggtgcgcatggtttacaaggaaaaataagtgatcactatttatcagtatgggaaaaagcaacgacgtatcaaatgtaccatggcttagcattattaattataggtgtaattagtggtacaacttcaatcaatgttaactgggctggctggttaatatttgctggtattattttctttagtggatcattatatattttagtattaactcaaattaaagttttaggtgcgattacaccaattggtggcgtattgttcatcattggatggataatgttaatcattgcgacattcaaatttgctggttaaattttaaaactttagattacctatgtaactaaacattaaatttttaataaaaataatcaagaaaaagagttacaaactcatcttttgggtatagaataccttcgaggtgagtttttatttatggaaaaaaagaataagcaaatagatagaggcgatttaaaacaaaacctatctgaaaagtttgtatgggcgattgcatatggttcatgtatcggatggggcgcattcatcttaccaggagactggattaagcagtcaggtccgattgcagcatcaattgggattgttattggtgcattattaatgatattaattgcggttagttatggcgcattagtagagagatttccagtatcagggggcgcgtttgcctttagtttcttaagtttcggcagatatgtgagtttcttctcatcatggtttttaacttttggttatgtctgtgttgttgctttaaatgcgaccgcattcagtttactagttaaattcttattgccagatgtcttaaataatgggaaactatacaccattgcgggctgggacgtttatattacggaaatcattattgcgaccgtattactacttgtattcatgctagtaacgattcgtggcgcaagtgtatctggatcattacaatattatttctgtgtggcgatggtaatcgttgtattattgatgttctttggttcattctttggtaataattttgcacttgaaaatttacaaccgttagctgaacctagcaaaggatggttagtgtctattgtggttattgtatccgtggcaccatgggcatatgttggatttgataatattccacaaacagcagaagagtttaactttgcaccaaacaagacatttaagcttatcgtgtacagtttattagcagcatcattaacttatgttgtcatgattttatacactggttggttatcaacaagtcatcaaagtttaaatggacaattgtggttaacaggtgctgttacacaaacagcatttggttatattggattaggtgtattagcaattgcaattatgatgggtatatttactggtttaaatggattcttgatgagttcaagtcgcttgttattttctatgggacgttcaggtattatgccaacaatgtttagtaaattacatagtaaatacaaaacaccatatgtcgcaatcatattcttagtaagtgtgtctttaattgcaccttggctaggaagaacggcattgacttggatcgtagatatgtcatctacaggtgtatccattgcctactttattacatgtttgtctgctgcgaaattattcagttataacaaacaaagtaatacgtatgcaccggtttacaaaacgtttgctattattggctcatttgtatcattcattttcttagcgttgttattagtgccaggttctcctgcagcactgactgcaccatcttatattgcattacttggatggttaatcatcggtttaatattctttgtcattcgatatcctaaattgaaaaatatggataatgatgaattaagtcgcttgattttaaatagaagtgaaaatgaagttgatgatatgattgaagaacctgaaaaagaaaaaactaagtaataaaagaatcgcacaatataccttcttaattcggaggcgtatcgtgcgattttttgtattataaattgacatttaagacgaggcagttgaaccgtatataaaattgctaagagttagggctgagccatttctaacaaatatttataatcgtttaaaagatttcacgaacccagaaacaattaatttggaaatttggtcggcgaataataaacctaatgcgatagctcctgcaataagtgtaacctctagcatggtattgattgctgtactgaaatttaataatactaaatttttcgttgcatcgtaagctaatccacctggcactaacgggatgatacctgtcaccataaaaatgattgcaggttctttttgtttacgagccatatagtgacttaataaacctagggcaagactgccgaagaaactagagtatatagtgtgcacattaaagccgttgaagaataaggtgtaaaccatccacccacacgtaccaacgaaaccacatgataaatataattttctaggtgcatcaaaaatgacgcagaagaacattgaagctaaaaagctaaagataaagtttaatatccaaaacatagtctgatactcctatactaaaattaatacgctaccaacgccagcaccgatgccaaacgcagtaaccaatgcttctaatgatttcgttgtgaacatcaacatgtgcccaccaaataaatcttgtattgcgtttgttattaatacaccaggaacaataggcatgactgccgcaatgataatagttgccaagtcacctgttggaataagtgtatgtccaataacggcgataatcccaataactaatgaaccaatgaattctgggataaactgtgcgtgtaacttacgatctaaaatctcagtgactaggtatcctagactacctgctaatatcgcagttaaaacatcaatcaatctaccaccttgtaaatataagaaactcattgcaatcattgctgcagcaaaacctttaaagggaagactgctgtcacgcttggcaacatatattttttcaagttgtgtttttgcctcggctaaagaaatttcattatttgtaatttgacgcgaaattttattagcttgagaaatttttattaagtttgtatctcgagaggtaattctaaatattctaggaaacgattccgaatgtaacgtaaactggatgacagtgtttgtaacaaagctgttactttcactgtaaccaagtttttttgcaatacgtgtcatggtatcttctacacgcgtaccttctgcaccagattctaatagtatgcgagcagcaagcatgacaacatctttgataagtacctcttgtttgtattcttctgaatttatgtccatttcatcaccattgtttataagaatttaatactcattatagtttatacactataaaataaccacatgagctttttgataagttgttattgattttaaaaaactaatatttgatactattgtaataataatcatcggaatttttagtagttaaaattctcttgaagtataaaaaggaaaaattattgaaaaaaattcgacaaaaatatgtttcaaatatttcaaataggttaaaataatattagttaaccattacaaaaattgtatagagtagcgactgtataatttctattgaggttaacgtttatatgtagtgatagtagttaaagttctcccaaggaagactactcgggtacactttgctatgagcaaagtgtactttgttattgataatacattagcacatatatataagtttaaacatacagatttcaactatttatcaaatcacgtcttatgtatacggaaatatactgaagataaacgaaaaattccaagcttatcggtttaagcttggaatttttttattaatttataaacgtaccaatgtattaagaaatcgcaaagaattgatcgaattcgtttgtgttaataatatgtcctacaaagaaactaccgaattcaccgtatcgtgctgttgtttcatcaaagcgcatttcgtatacaatttttttgaattgtaatacgtcatctgagaacaatgttacgccccattcgaaatcatcaaaccctacagaaccagtaataaattgtttgattttgccagcatattttctaccaatcataccatggtcatacattaatttttggcgttcttccatagttaacatgtaccagttataagtttcattacgacgtttgttcattggatagaaacaaatataatcagaatgtggtaattctgggtataatcttgctttgatatgagggttctcataaggatcttcatcagatttaccagctaaataattgctcaattcaatgactgatacatatgaatatgtagggattaggaagtcagcaatgcgcaatttgttaaattcattttcaatatgatttaaagacttcatttcaggacgtaagaaccataataacaaatctgctttttgaccagttatattataaatagcttgatcaccagattttgatgatcttacagttgctgtattttctaaaaatgattgaaattcagtgacaagtgcatcgcgttcgtcctttggaactagacgtaatgatgcccaatcaactgcataaaataaatgtagactataccaaccatctaatgtttcggctgcttgactcatgtttatcgctccttttcaaaaatcatcagttctttataaattttatcataaagcaaaggggtaacgataaaattatgattacaaattggtgacgtggcattatgaaataaaatggcgtataattataccgtgaatgattaataagatttatattacaggaggacattatggctgatttattaaatgtattaaaagacaaactttctggtaaaaacgttaaaatcgtattacctgaaggagaggacgagcgtgttctaacagctgcaacacaattacaagcaacagattatgttacaccaatcgtgttaggtgatgagactaaggttcaatctttagcgcaaaaacttaatcttgatatttctaatattgaattaattaatcctgcgacaagtgaattgaaagctgaattagttcaatcatttgttgaacgacgtaaaggtaaagcgactgaagaacaagcacaagaattattaaacaatgtgaactacttcggtacaatgcttgtttatgctggtaaagcagatggcttagttagtggtgcagcacattcaacaggcgacactgtgcgtccagcattacaaatcatcaaaacgaaaccaggtgtatcaagaacatcaggtatcttctttatgattaaaggtgatgaacaatacatctttggtgattgtgcaatcaatccagaacttgattcacaaggacttgcagaaattgcagtagaaagtgcaaaatcagcattaagttttggcatggatccaaaagttgcaatgttaagcttttcaacaaaagggtctgctaaatcagacgacgtgacaaaagttcaagaagctgtcaaattagcacaacaaaaagctgaagaagaaaaattagaagcaatcattgatggcgaattccaatttgatgctgcgattgtaccaggtgttgctgagaaaaaagcgccaggtgctaaattacaaggtgatgcaaatgtctttgtattcccaagtttagaagctggtaatattggttacaaaattgtacaacgtttaggtggatatgatgcagttggtcctgtattacaaggtttaaattctccagtaaatgacttatcacgtggctgctcaattgaagatgtatacaatctttcaattatcacagcagcgcaagccttacaataacgatggatttagcgagtaaatattttaatggcgtcaactggcgatatatcgatcattcttctggattagagcctatgcaatctttcgcattcgatgatacattttgtgaaagtgtgggcaaagatatatcagataatgttgtgcgtacttggattcatcaacatactgttattcttggtattcatgattcaagattgccgtttttaaaagatggcattgattatttaacgaatgagattggttataatgccattgttagaaattctggcggcctaggtgtcgttctagatcaaggtgtattaaatatatcgctgatgttcaaaggacaaacagaaacaacgattgatgaagcgtttactgtgatgtatctcttaattagcaaaatgttcgaagatgagaatgttgatattgatacgatggaaattgaacattcttattgcccaggaaaatttgacttaagtatcgatggtaagaaatttgcaggcatatcgcaacgaagagttagaggcggtattgctgtacaaatttatctttgtgttgaaggctctggttcagaacgtgcattgatgatgcaaacattttatgaacatgctttaaaaggtgaagtgactaaattcaaataccctgaaattgaaccatcttgtatggcctcactagagacattacttaacaaaacgattactgttcaagatgtaatgtttttactattatatgcaatcaaagatcttggcggtgtattaaatatgacgccaattactcaagaagaatggcaaagatacgatacgtattttgataaaatgattgaaagaaacaagaaaatgatagaccaaatgcaatagttaaatatttaacagcccctttcaagttatcgtttggggctgttatttttgaaagtatccataaatagcatagatatgttattaacctaatatttaaattgaacatcattaaattaaaagtaatgatatgattgaaataataaatttaataaggaaatttcatgttttacgtattaaatagattgagaatagggtatatataatgcgtatgactatgaaagaaacgaccttctattgaaatgttctaatactttagtagtaaatctatatattccaattattatttgtagtattatagttagggtggaaaattataaattgtagggctattttataaaaagataaagaatctgaaatatcactcgataagatttaaactttgaagtaaacgaaagttagttttatactaatcaagttaagtcatatataaatttaaaataaagtttatacataatatgaataatgtgagataaagactgcaatgaaacttaacgcgaatgcgtatgcaacttagaatatgatgtcttttactaataaataaaaacaatgtatcaagtataggataaatataaaaggtgatattgacatgacaagaaaaggatatggggaatcgacaggtaagattattttaataggagaacatgctgttacatttggagagcctgctattgcagtaccgtttaacgcaggtaaaatcaaagttttaatagaagccttagagagcgggaactattcgtctattaaaagcgatgtttacgatggtatgttatatgatgcgcctgaccatcttaagtctttggtgaaccgttttgtagaattaaataatattacagagccgctagcagtaacgatccaaacgaatttaccaccatcacgtgggttaggatcgagtgcagctgttgcggttgcttttgttcgtgccagttatgattttttagggaaatcattaacgaaagaagaactcattgaaaaggctaattgggcagagcaaattgcacatggtaaaccaagtggtattgatacgcaaacgattgtatcaggcaaaccagtttggttccaaaaaggtcatgctgaaacgttgaaaacgttaagtttagacggctatatggttgttattgatactggtgtgaaaggttcaacaagacaagcagtagaagatgttcataaactttgtgaggaccctcagtacatgtcacatgtaaaacatatcggtaagttagttttacgtgcgagtgatgtgattgaacatcataactttgaagccttagcggatatttttaatgaatgtcatgcggatttaaaggcgttgacagttagtcatgataaaatagaacaattaatgaaaattggtaaagaaaatggtgcgattgctggaaaacttactggtgctggtcgtggtggaagtatgttattgcttgccaaagatttaccaacagcgaaaaatattgtaaaagctgtagaaaaagctggtgcagcacatacatggattgagaatttaggaggttaatgcgttgattaaaagtggcaaagcacgtgcacatacgaatattgcacttataaaatattggggtaaaaaagatgaagcactaatcattccaatgaataatagcatatctgttacattagaaaaattttacactgaaacgaaagtcacttttaacgaccagttaacacaggatcaattttggttgaatggtgaaaaggttagtggcaaagaattagagaaaatttcaaaatatatggatattgtcagaaatagagctggcatcgattggtatgcagaaattgaaagcgacaattttgtaccaacagcagcaggattggcttcatcggcaagcgcatatgcagctttagcagcagcttgtaatcaagcactagacttgcagctgtcagataaggatttatcgagattggcgcgaattggttcgggttctgcatcgcgtagtatttatggtggatttgcagaatgggaaaaagggtataatgatgagacgtcatatgccgttccacttgaatcgaatcattttgaagatgaccttgccatgatatttattgtgattaatcaacattctaaaaaggtacctagtcgatatggtatgtcgttgacacgaaacacatcaaggttttaccaatactggttagatcatattgatgaagatttagctgaagcaaaagcagcgattcaagacaaagattttaaacgccttggtgaagtaattgaagaaaatggtttgcgtatgcatgccacgaatctaggatcaacaccgccgttcacatatcttgtgcaagaaagttatgatgtaatggcgctcgttcacgaatgccgagaagcgggatatccgtgttattttacgatggatgcgggtcctaatgtgaaaatacttgtagaaaagaaaaacaagcaacagattatagataaattattaacacagtttgataataaccaaattattgatagtgatattattgccacaggaattgaaataattgagtaaggaagagataaaatgattcaggtcaaagcacccggaaaactttatattgctggagaatatgctgtaacagaaccaggatataaatctgtacttattgcgttagatcgttttgtaactgctactattgaagaagcagaccaatataaaggtaccattcattcaaaagcattacatcataacccagttacatttagtagagatgaagatagtattgtcatttcagatccacatgcagcaaagcaattaaattatgtggtcacagctattgaaatatttgaacaatacgcgaaaagttgcgatatagcgatgaaacattttcatctgactattgatagtaatttagatgattcaaatggacataaatatggattaggttcaagtgcagcagtacttgtatcagttataaaagtattaaatgaattttatgatatgaagttatctaatttatacatttataaactagcagtgattgcaaatatgaagttacaaagtttaagttcatgcggagatattgctgtgagtgtatatagtggatggctagcgtatagtacttttgatcatgaatgggttaagcatcaaattgaagatactacggttgaagaagttttaatcaaaaactggcctggattgcacatcgaaccattacaagcacctgaaaatatggaagtacttatcggttggactggctcaccggcgtcatcaccacactttgttagcgaagtgaaacgtttgaaatcagatccttcattttacggtgacttcttagaagattcacatcgttgtgttgaaaaacttattcatgcttttaaaacaaataacattaaaggtgtacaaaagatggtgcgtcagaatcgtacaattattcaacgtatggataaagaagctacagttgatatagaaactgaaaagctaaaatatttgtgtgatattgctgaaaagtatcacggcgcatctaaaacatcaggcgctggtggtggagactgtggtattacaattatcaataaagatgtagataaagaaaaaatttatgatgaatggacaaaacatggtattaaaccattaaaatttaatatttatcatgggcaataaatgatttgataggggagcaatcatctaatttaattagaagataaatgctccattttttattgccagccgtgttacgtatcttgaaaaaaatattaaaaagagtaaaatagatagagttaacgaaaaaattaatgaaatcgatgatatagatatgataaagaaaggtgggtagcaatatgaaaaatacattccttatttgtgatgaatgtcaggcagtcaatataagaacgttacaaaagaagttggaaaaattagatcccgatgctgaaatcgtgataggttgtcaatcttattgtggacctggacgccgaaaaacattcacttttgttaataaccgcccactggctgcgcttactgaagaagaattaatcgaaaaagtttctcaacaattaaagaaaccacgtgatcctgaagaagaagagcgtttaagaaaacgacatgaagaacgtaaacgtcgtaaagaagaacaagatagaaagcttaaagaaaaattagaaaagcgaaaagcacaacaataaagcctgatggcagcatcattcaatgcgtgccaccaggtttttatgttttgtctagaaattaaataaatcattaaatgattcggccatcgtaggatgcgtataaatattatctcgtaatacggtatatggaatgttttgatcaatcgcaagtttaattatattaattaattcttcagattgcttaccatataatgtagcacctaaaatcatattattttcattattaatgactactttaaataaacctcttggatcattgttaattttgtgacgaggtatagcacttactaaaagttgatgttcagtgtaatcataatgttgagcgacagcttctttactagttaatccaacacgtgataatggtggatctataaatactgtataaggcacgctgcctctattgtcagtcgtacgtgactgattaccatataacgctgatttgataattcgataatcatctaaagatatatacgtaaattgaagtccgcctttaacatcacctgcagcataaatatgcggcacagttgtttgaagttgagcattgactttaatttcgcctctatcgcctaattcgatatcagtattttctaaagctaaatccgtattcggtttgcgtccgatagccaaaagtactgcatcagcctcaaagttgccaacattagtatggactgttgtatgatgatcgtcagatgacaattcagtcgtttcaacatttgtatgcaatgcaatacctttattttctaagtcagtaatagcatgcgcaacgacatcttgatcttcgcgtggcataaatgattcaccacgttctaatacagtaaccttactacctaaattcgcaaacattgaagcaaattctaaggcgatataaccgccacctacaataacgaggtgcttaggttgatagctaatgtttaataaacctgtcgaatcgaagacgtgtttagcttgatcaaggcctttaatgttaggaatgacagaggtagcaccggtattaataatgatatgaggtgcagtaatactatcgacgatatcgccatgttgatctaataaattcacttcagtattagatttaaactgcgctttaaaatccagtacatcaatgttgttatcgtctgctaataagtggtaatttttattgtttagcgcattgacaacatcgtttttacggttataacttgcttcaaaagatttgccttctaatccatcatgtacaagtgtcttcgaaggtatacatcctatatttatacaagtgccgccatacattttcgaagattgttcgataactgcgacgtgttgacctgttgatgcagcatatttggctaaagttttaccagctttcccaaatcctattacaattaaatcatatgttttcatgacataaatcctccttttgaatgtcttcaatgacatctttgattgttttttctttataaaaattaataatgatattctgttcgtcttgttgataatgagacatggtagttgcaatattacgagcaatttgacagtgactgccttcgtcgccagtaaatagtcgtgtgtgatgttctttctctaagacaaaatgtttatataatgttgctaaagagacatcagcgctacgatcatttgctaaatatccaccatctttacctcgtattgtgtcaatcatttttaaatcgacaagttgagtcgtcacgcgtcgtaattgaacaggatttaaacaagttaattctgctaatgaactactattgaatttttctgaatgatgcttagttaaaaaagctaatacatgcacggcaatgttaaattctaaattcaatgtttctcacctcataattgtaactgtattagttacaattaaaaatcattttgctcaatgtgtcaatacttatgtttgaaaagtgttgaattaggtgtggttattgtgatgatttattgtttgaaagttgatgcattaacggtgagattgcacaattgaaattttaattatgtatgaactgatagatatgaaatgaatattgaaaatgagagcaataaaattttgaatgatgatgttgtgtgattgtataaacttattcgtattttagatacgttttgatatttcgcatgatgaggaaatacttttaacaactgatgacatattttaatagtgaatatattttgagatattaatatatttaatgttaaggatgttgtcgcaataaaattaaaatattgaaagataatttttattgattaattgcgaatatacaaagacaccattatatccatatgctaaaataagaaaaaaggcgacatgttatctcaatttacctgcatctagactcctttacataagaaacaatcatcgccgagttttaaaattttacaactttgtagatgtaaaaagcatttgattttaaatagtttgaaaatcatatatttttgaaaaaggagcatgccgatgagtattgacatgtatttagacagatctcgaaaccaagcttcaagtgtggggaatttgagtcaaacaatgaattcaaattatgatgcgttggaaaaagcaattactcaatttatcaatgatgatgcgcttaaagggaaagcgtatacgtcagctaagcaattttttagtacggtgttaattccattatcaacaagtatgaaaacattgagtgatttaacgaagcaagcttgcgataattttgtgtcacgttatacgagtgaggttgatagcatatctttaaaagaatcagagcttgaagaagatatcagatcattaagtcaacaaattacgcgatatgaaaatttgaataacaatttgaaaaagcatgcttccgataatcagcaagccatttcatcgaaccaacaaataatacaaacattaggtcaacaaaaacatgaattagaagagaagctacgcaaattgcgtgagtttaatcaaaaatcaccagaaatatttaaagaagttgaagaatttcaaaaaattgtccaacaaggacttacccaagcgcaaaatttttggaacttttcaacaaatcaatttaatattccttcaggtaaagaacttgattgggccaaagcaagtcatgaaaaatatttgaaagttgctatggggaaaattgaacataaagcagagaaagaaactttaaataaagcagactttgctgttataaaggcatatgccaaagagcatccagaagacgatatcccgaaaagtataatgaaatatataaatgacaataaagacagtattaaacgagatataggattagatatcacatcaacacttttagagcaaggcggtataaatgcaagtaaattcggtgtatttatcaatacagcaggtggagtgaaaggcccagcaggtccaaattcatttgtggaagtcaaacgtacatcgggtaatgtgtttatagaaaatggtagtaaatttgcaaaaggcggaaaatacctaggtaaaggtgttgctggtgtaggatttggtataggtatgtatgatgatatggcaaacgatgataaaacagttggagaggcattgtcgcataatgctttaactacaggaataggtactggtgctggaattgctacttcagcaacaatagtcgcacttgctagtaacccagttggttgggctgctttaggaggtttggcagtaggtattatcttttctaatcttacagacttggcatatcaaaataattttcttggaataaaagacaaaacggattgggtaggacataaaatagacgatggtattgatgctgttaaaaaatctacagaaaaagcagtagatagttttgagaatgctgttggtgaagctacaaaaggtatttctagtcatattaaccctatgaaatggagctggtaaatattgctttgtgaaaccgaaattatcaataaaaatccaaaatatagagttattaagtatgatgatgagtacttaatggtcgatgtaataagcacttggcttgtatacttttttccatttattaattggttcattccaaaaaggtgcgccaaaattagtagagaagagtatgaaaagctgaacactgttaagccagttaaaaataaaactttttggcctgttgtaggaggaacaatcttactgggtgttacttccagaaagtacatacacttacttaatattcaattagaaaaaatattggttataattatatgcttcgttgtatttctatgtattttaatcttttttgtgcttctgaatcgaaaattaaaattgaaagttttcgataataaaatagaagataaaaaaataatcttagtaccaacattaaaaaatgctgttcttatattatatagctatttgttgattggaggcatgtcaattttagctttaagcatgttactgacattagaaaaccaaaatttaataacttttatagcttggggtattgggttaatgttgtttttcttgatgaatataactctcattgttaataaaaaagccaaagttataaaaaggtgaataaataactaactatattgtattggccgttcttcaaataaaaaataatttgaataaggtggaagtgataaacagtgctatgtgaatctaaagttatcaacaaaaatcctaagtatagagttattaaatatggtgatgaatatttaatggttgatttagtaagtacctggttaactttatttcttcctatgattaattggttaattccaaaaaaatatgtcaaaatcagtaaaaaagaatttgacgatttaaacattgtcaaacctgttaaaaataaagctttttggccagttgcaggtagtactattttgttcggagttacgtttagaaaatatattccttcacttaatattcaattagagaaaaacatggtgattgtaatatgttgtgcaatatttctgggtgttttaatactttttttatttctgaatcgtgtaagctaagattggaaatttataataataactctagtaaagggaaaataattttatttccttcattaaaaaacttttgcttcacaatattttattattttttatttggtggtctttcaataatggctctaagtatgttattaactttaaatcctcaaaatataataggctttattggttggtaatgactgcaggtttctttttgttaaacatgtcatcgattattgacaaaaaaatttatgtattatctaaaaataacatggtggaaaaatgacgattttagctggatttattgtgggttctgtttcgacaatacttgtatattgtaccaatcaaaaaatgaatttggaataaaagataaaacatattagataggtcatcaaacaagatgacaatacagatgttgtagaaaatatcgcaaatgatattgtagatactattaaaaacgccattggtgaaggtacaaaaagtatttggaatcattaaatctaatgaaatgagagtggtaaatgttgctgtgcgaatctaaaatcatcaataaaaacccaaaatatagaattattaaatataatgatgagtacttaatgatcgatataataagtacttggattagtttgttttttccatttatcaattggttcatcccaaaaagatacgtcaaaattagtagagaagagtttgaaaatttaagtattgttaaacctgctaaaaagaatgttttttggccagttgcaggtatctctactttattcgcagttacattaagaaagtatacgcatttacttgacactcaacttgataaaaaattagttattgccatatgttgtatcacatttatagggattttaatattttatgtacgcctaattaaaaaatcatctttaaatatttataatactaaaaataaaaggtcgaaaatcatcttaataccaacactaaaaaatttttgtttcacattgttcggatatgtttttttaattttttggacagtggttttctcatatgctctattatcaatgagttatcaaaacataatagtatattttgcttggattacagcaataatgggtttttttctagtgaatatagctttaattatagataaaaacattcatgtcatacttaaaaattaaatggtggtaataaattgagattaatgatatgcaaatgacaatgaataaaatttttaatgatagtaagttgataatattttaatgtcttttgaagtatcgaaaaatgtattacagataaaatcaaatggaagtggagataatgctttgcgaatctaaagttattaataaaaatcctaaatatcgaataatcaaatacgaaagtgaatacttaatgattgatttagcaagtaataggattgttttcttctttccatttattaactggctcataccgaaaacatatatcaaaatcactaagaatgattatgaaaaattaaatattgtcaaaccagttaaaaataaatcgataggatggactatattcgcgggtattgtgttacttggtggtacagtaagaagaaatacttatttatttgattttcaattagaagaactaattgtttggagcagctgtttcattgggtttttagggattatatttttttattgttatctaaataagaaattaacattaaatatttataatgaaagtaaaaataatgaacttaaattaagattattaccctcctttaaaaatatttgtttcacaattttttattacctatttactggtttcatgtcttatggggcattttacttgttggtgtttgaaaatgtacaaaatttaatcttatatgtttcttggcttttcatgactatgctatttatgtttatgaacatgcattcaattatagataaaaaagtacatatattcttaaagtctaataaatagttacaaatttagttagttttcaattgtaaattaggggtggtaaacagtgctttgtgaatctaaacaaatttataaaaatcctaaatatcgagttattagatataataatcaatatttcatggtcgatttagtaagtacttggattacttatttttttcctatgattaattggtttttgcccaaaaagtacgcaaaaattagcgaaaatgaatttgaaaggttaaatattgtcgaacctgttaaaaacaatgttttttggccggttgcaggaagttcagttctattcggaattatattgagaaagtacggtaatttctttaatgttcagtttgaaaaacaactagcaatcactgtattttttatcatgttaatagggatgttaattttttatttctatctaaataaaaaattaacattaaaaatttttaataccaacgtggttaataagaatagagttgtattaataccgactttcaaacaagggttgttattagtttttgcgtacatttttttaggaagcgcttcaatatttactttaaccattcttttgacgacagagtcataaaatataataatatttttaacttgggttattatcacgatgtttttctttttagtgaatatggcttcgataggtaatacaaatattcatgttattttaagaataaacgagtagtaaaaatgatcgaaattggtagtatcgcatatttaaacggtggttcaaaaaaatataatcatatcttaaatcaggaaaatagatagtaatgtttgaatataccaagtgaaaatgcccattgtgattgataaaggaaaaaactgttttaatttaaaaatgaaatatagagcgtgttattttgtatgatagctcttataacattggcgttttttaatccaataggatggacggttttagctggttttgttgcggaatctgtttagacaattcttataaattggacttttcatactaataaatttggattaagagataaaactaattggataagacattaaatagacgctgtttaaaaataccacagaaaaagctgtagatagtgttggaacgatagttggtgaaggtacaaaaagtattggggatcatttaaaactaatgaaacgggagtggtaaatgttgctttgcgatgttagagtcatttataaaaatccgaaatacaaagtcattcaacataacggtgaatacttattagtcgatttagtaagcacttggttcgtgtactttttccctttcattaattggttcattccaaaaaagtacgcgataattagcgaagaagaatttgaaaatttaaatgttgttaaaccaaataaaaataatgttttctggtcagttataggaagttcggttttgtttggagttactttaaggaaatacgtacatgtttttgatgttcaattagataagctagttgtaatgatattgtgtgctctcgctttaatttgtgttatagttttttattttaacttaaatagaaagcttaagttaaaagtgtttgatacaaatattgaaaaaaataagagagttatattaataccaacgtttaaacttggctgttttttagttttcggatatattttcgctggaagtttttcaatattttcactaattgcccttatgacaatcgaacctcaaaatataataatatttatttattggattatgatgacaatgcttttctttttgttaaatatgacttcgataggtaatgaaaaagttcgcgttataatgaaaaataattgattacatttaaaatattctaaatgttgtcgacacaatccttttaagacgctagtagaatttaaatgacttctaatgtatatgaaagtgtatcaatataaaaccaattgaaaagaagtggagacattgctttgtgaaactgaaaatattaataagaatcccaaatatagaattatcaaatacaaagatgaatatttgatgattgatttaataagtacatggttagcactctttttcccaatgattaattggctgattccaaaaaagtacgtcaaaatcagcgaaaaagattttgaaactttaaacattgtgaagacaactaaaatcaattctttttggccagtggcaggaagtacggtcttatttggtgttatgttaagaaggtattcccatttatttatcgttaaatatgaatatagtatagtaattttaatttgttgcatcataatactaggtatttttctgttatttttatatttaaatcaaaagttaaagttacaaatctataatgaaaacaaaaataaaagcaataagataatcatatttcccactttaaagagtctttgtttatcaatagttttatatatttatttaggtggtggttcattctttactatttatatgttattgacgattgaagttcaaaatataatattatttataactttgtttgtaatatttttgtttttcttatttttaaatatgtgctcactatatgacaataaagttcatgtattatttaaatcaaatggaattgaaaagttttaataggaataataaacaaaggaatggtagtgataagtattgctatgtgaatctaaagttatcaacaaaaatcctaagtatagagttattaaatatggtgatgaatatttaatgattgatttagtaagtacctggttaactttatttcttcctatgattaattggtttattcccaaaaagtacgtgaaaattagtagagaagaatttgaaagtttaaatattgtcaaacctgttaaaaataaagttttttggctagttgcaggtagtactattttgttcggagttacgtttagaaaatatattccttcacttaatattcaattagagaaaaacatggtgattgtaatatgttgtgcaatatttctgggtgttttaatactttttttatttctgaatcgtaagctaagattggaaatttataataataactctagtaaagggaaaataattttatttccttcattaaaaaacttttgcttcacaatattttattattttttatttggtggtctttcaataatggctctaagtatgttattaactttaaatcctcaaaatataataggctttattggttggttggtaatgactgcaggtttctttctgttaaacatgtcatcgattattgacaaaaaaatttatgtattatctaaaactaacacggtggaaaaatgatggtttagctggatttactgcaggttctatttcggcaatacttgtatattggaccaatcaaaaaaatgaatttggaataaaagataaaaacgattggataggacataaactagacgctggtatagatgctgtagaaaaatctgcagaaaaaacagtagatggtgttgaaaatgtcatggtgaagcttcaaaaagtatttctaatcatataagccctaagagatggagctggtaaatgttgctatgcgaatctaaaatcatcaataaaaatccaaaatatagaattattaaatataatgatgagtacttaatggtcgatataataagcacttggattagtttattttttccatttatcaattggttcatcccaaaaagatacgtcaaaattagtaaagaagattttgaaaacttaaatattgttaaaccagctaaaaagaatgttttttggccagttgcaggtatctctgctttattcgcagttacattaagaaagtatacgcatttacttgacactcaacttgataaaaaattagttattgccatatgttgcatcacatttatagggattttaatattttatgtacgcctaattaaaaaatcatctttaaatatttataatcctaaaaatgaaaggtcgaaaatcatcttaataccaacactaaaaaatttttgtttcacattatttggatatattttatttggcggattgactatgctattcctagatgcactattatcaatgagtcaccaaaacataatagtatattttacttggattgcagttataatgggtttttttctagtgaatatagctttaatcatagataaaaacatttatgtcatacttaaaaaccaatagaaattaccaaattgaatttgcaatggctttaatgttgtcgttcttaaatgtttttcaatttctgattcaaaagtacatgtaatttaaaggctaacgagcaatcgcgctatgtgaatatcaatttaagcaatacttattttaactgagttttatataacgttttcctattacaccgcttaaattcaagctctaattctaacatttggaagttgtattaaatcatggtagtgtgatagtggaaaagttataaagataaggagctgggtctaatgaagcaatttgtaaacttaggtaaatctgatgttgaagtgtttccaatcgcacttgggacgaacgcagtaggtgggcataatttatatccgaacttagatgaagaacaaggaaaagatgttgttcgtcaagccattaatcatggtattaattttttagatacggcatatatttatgggccagaacgatcagaagaattggttggagaagttgttaaagaatatccgcgagagcaaattaaaattgctacgaaagggtctcatgaatttgatgaaaatcaagaagtacatcagaacaatcaaccggaatatttaaaacaacaagttgagaatagtttgaaacgtctacaaactgattatatcgatttatattatattcattttccggatgacaacactccgaaagatcaagcagttgcagcattacaagagcttaaggaacaagggaagattaaagccattggtgtatcaaatttcacattagatcaacttaaagaagcaaataaagatggttacgttgatgttgtacagttagaatataatttattgcatcgcgaaaatgaggcagtattacaatattgtgttgatcaccaaatcacatttattccatatttcccattagcatccggtattttagctggaaaatatgatgagaacactaaatttagtgaccatcgtactacacgtcgtgattttaaaccaggtgtatttgaagaaaatgttcgtcgtgtaaacgctttggaaaagattgctgcagcacatcaaacttcaattgcgaacattgtattagcgttttatttaacgagaccagctatcgatgtaattattcctggcgcaaaacgtgccgaacaagtaattgaaaatatcaaagctgctgatattgtgttatctaaagatgaaattcaatatatcgatgaattgtttccaattgaagactaaatgaattgtatttaatggtgacatcaggctgggacataaattaatgttctatgctctacgaagttatattggcagtagttgactgaacgaaaatgcgcttgtaacaagcttttttcaattctagtcaggggcccaacacagagaatttcgaaaagaaattctacaggcaatgcaagttggggatgggccccaacaaagagaaattggattcccaatttctacagacaatgcaagtcggggtgggacgacgaaataaattttgcgaaaatatcatttctgtcccactcccaccacaaacaacgtcatataaggcatgacgaaattttgtcaaatttccataaaagttgtaagcgttttactattcggtaggcaaggcttatgatagtataattaggtaacaatatcacaaacgataattttcaatcaaaagtgaggttaggctaaaatgattactgttttgtttggtggaagtagaccaaacggtaatactgcacaattaacaaaatttgctttgcagggattagattatcaatggattgatgtaacgcaacatcggtttaaaccaattcgtgatgtcagacatattgaagaaagtatcacagactatgaagatgactaccaggaaattttagataaggtattggcaagtgatacaattatttttgcatcaccagtgtattggtatagcatttcagcaccattgaaagcatttatagaacattggtcagaaacactacaagataaacgttatcctaattttaaggcacaaatggccgaaaaagattttagagttattttagttggtggagattgtccgaaaattaaagcgaaacctgcaataacgcaaatgaaatatagtttggactttttaggtgcaacattaaatggctatattattggtacagcaaataaacctggtgacatcatgaaagacaactatgccttagcacgtgcgacagaatggaatcaactattgcaataagtaatacctcattacaaaacgaagtgaatttttgcttcgttattttttatttttaattttaacggaaaatataaatatataaattgaatagacaatcattgtttattaagtattgagcaagttgtggtataatgccgttattaaaacttgttaataaggggagaaagtcatgttcaaggtaagacaagcaactgaaaaagatgttgttcaaattagagatgtcgcaactaaagcttggtttaatacatatttaaatatatacgctgcgacaacagttaatcacttgttagaagcttcatataatgaacatcatttaaagaaaagacttcaagaacaattattcttagtcgttgaagaaggtaatgacatcgttggctttgctaactttatttacggtgaagaattatatttatcagctcattatgttaaaccagaatcgcaacatacaggttatggtacagcattgttaaatgaaggattatcacgttttgaagataaatttgaaggtgtttacttagaagtagataataaaaatgaagaagcagtagcttactataaagagcaaggttttacaatcttacgctcttatgagccagaaatgtatggcgaaaagttagacttagcacttatgtacaaagcattttaagtaaattaaatattatattaaacgaaaaggaggggaataatgactaacgcatatgtagatttaaaattagtagaagaaaaagtttttaaagacccgatacatcgatatattcatgttgaagatcaattgatatgggatttaattaaaactaaggaatttcaaaggttacgtcgaattagacaattaggaacactgtacctatcttttcacacagcagaacatagtcgctttggacattctttaggtgtgtatgaaatagttagacgattaattgatgagtcatttattggtcatgatgcatgggacaataaagatagaccgttggcattatgtgctgcattattacatgatttaggacatggtccattttcacatagttttgaaaaaatatttaatacagaccatgaagcatacacacaagcgattattactggagatactgaggtgaatgctgtattacgtaaagtgtcgcctgagtttccaagagaagttgcggaagtaattaataaaacgcatcataataaattggtcatttcgatgatttcgtcacaaatcgatgcggatagaatggattatttacaacgtgatgcgtatttcacaggtgtatcatatggtgcttttgatatggagcgtattttaagattaatgcgaccttctaaagatgaagtactaatcaaagaaagtggtatgcatgcagttgaaaactttattatgagtcgttatcaaatgtattggcagatttattttcacccagttagtcgtggtggagaagtgctgcttaataattgtttgaaacgcgcaaaacagctttataatgaaggctatgaatttaagttgcatccacatgattttattccattttttgaagagacagttacgattgaacaatatgttgaactcgatgaagcggtagttacgtattatttggaaaaatggacaaaagaagatgatgctattttaagtgatttagcaagtcgatttattaatcgagacttatttaaatatattccatttgatggctcaattattacaatatcagaactgcaagaactgtttgaagcaggtggtattaatccagattattattttgtgagtgaagcattttcggatttgccatatgactatgatcgaccggggtcaaatcgcaaaccgattcatttattaagacaagatggtaagattagagaaataagcaatcaatctttagttattcatagtattacaggcattaatcgccaagactataaattatattatcctagagaaatggttgcaaagattaaagataagacaattagagaagctattgaaaatttgattaatgagcttaattaaacagggctaaaattgttatcgttaaatatggaggttatatcattgtctgagaaaaaaggctttaattttaatatcataaaaaatgaccctctagatggtcataaaggtacaaatattggttcaattagcttagacaatattgcaccagtttttatcgatgttgctaacaaagaagcatttattgatattggaggcatgcatgctcgcgccaaagttgaaaaaggcgtgaaatggattactgataaagctgctgttgaaggcgatgaagctaaagaatattggttgtgttgggtaacaacagaacgtaatgaacaaggaccatattatgctggtttaacagcgtgctatttattagtgaataaagcaattcgtcgtggttataaaagtatgcctgaacatgttaatatgatggataaatcaatgaaacatcatattatcattgatcaaattggtgacgagaataaagttattttaaaagactttttaatgaaccatgatgaaggtatgtggaagcattcttctgatgcattacatcaagcatttaattaaatattagaaactaaaatttcccaattaatctataaagatatgattcatttctcaatgacgacgtaaatcttgaggtgaaaataaagtcttagattgattgggagtttttttaatttttttgaaattaaattaatctgtagttaataaaaaatttgaataactgacacatttttttgatcatagctatatactttgtgaattaattcacattataataagagtgaagataagagtattataaattatctttaaataaatatatgtgaagtaaaaattacacgttagcatatcgattatgtcatttcttttaacatattaactagggaaacgttaaaagttaacggttgatatctaactaaaaacaaagtcacagtagtgtgttttaatttggcgtctattacaaataaaaattacatctataattattcgttttcatttttgaaagtaatcgccaattaatatcatacatactggagtgactataaggaggacattattatgagagcagcagttgtaacgaaagatcacaaagtaagtattgaggacaaaaagttaagagctttaaaacctggtgaagcattggtacaaacggaatattgtggcgtttgtcataccgatttacatgttaagaatgctgattttggtgatgttacaggcgttactttaggtcatgaaggtattggtaaagtcatcgaagttgcagaagatgtagaatcattaaaaattggagaccgtgtgtctatcgcttggatgttcgaaagctgtggaagatgtgaatattgtacaacaggtcgtgaaacactttgccgtagtgtgaaaaatgctggttatacagtagatggtgcaatggctgaacaagttattgttactgcagactatgctgtgaaagtacctgaaaaattagatccagcagcagcgtcttctattacatgcgcaggtgtgacaacttataaagctgtaaaagtaagtaatgtgaaacctggacaatggttaggtgtttttggtataggtggtttaggtaacctagctttacaatatgctaaaaacgttatgggggctaaaattgttgcctttgacattaatgatgataaattagcattcgcgaaagaattaggtgcagatgttattattaattctaaagatgttgatccagttgcagaagttatgaaattaactgataacaaaggattagatgcaacagtggtaacttcagttgctaagacgccatttaaccaagcggttgatgttgtaaaagctggtgcaagagttgttgctgttggtttacctgttgataaaatgaacttagatatcccaagattagtgcttgacggtattgaagtagtaggttcacttgttggtacaagacaagacttacgtgaagcgtttgaatttgctgctgaaaataaagtaacacctaaagttcaattaagaaaattagaagaaatcaatgatatttttgaagaaatggaaaatggtactataactggtagaatggttattaaattttaaaaatatcaaatgactttatagataaagaaggtagtgctctgaacactatcattataatcaaacacgaggttttcatgaaagatagtgaaaatctcgtgtttttttggttttgaggtgttgtttgtattttataaaatggcttacatatatcaagcgttgattaagtatggaattgttaattaattgaacctatttagctttaagaaggcataacaagatgaccttattttatgctataatatttctattatgcgaagattaaggtgagtagtaaattggataaaaaagtaagtatttatacaaagcaagtgttgaaacagcacaacgaaaaagaaaaatttgaatttactactgaaggaacttggcaacaaaggcaatctaactttattcggtatgtagaacaaattgaggatgcaacagttaatgttacaataaaagtggatgatgatagcgttaagttgattcgtaaaggcgacattaatatgaatttgcattttgttgaaggacaagcgacaacaactttttacgatatatcggctggacgaattccactagaagttaaaacattacgcattttacatttcgtaagtggagacggtggcaagttaaagattcattatgaattatatcaagataatgaaaaaatgggttcttatcaatatgaaattaactataaggagataggcgaatgaatattattgatcaagtgaaacaaacattagtagaagaaattgcagcaagtattaacaaagcaggattagcagatgagattcctgatattaaaattgaagttcctaaagatacaaaaaatggagattatgctactaatattgcgatggtactgactaagattgcaaagcgtaatcctcgtgaaattgctcaagcgattgttgataacttagatactgaaaaagcacatgtaaaacaaattgacattgctggtccaggattcattaatttttacttagataatcagtatttaacagcaattattcctgaagcaattgaaaaaggtgatcaatttggacatgtaaatgaatcaaaaggtcaaaatatattgcttgagtatgtttcagctaaccctacaggagatttacatattggtcatgctagaaatgcagcagttggtgatgctttagctaatattttaactgcagctggctataatgtaacacgtgaatattatattaatgatgctggtaatcaaattactaacttagcgcgttcgattgaaacacgtttctttgaagctttaggtgacaatagttattcaatgccagaagatggctataatggcaaagatattattgaaataggtaaagatttagcagagaaacaccctgaaattaaagattattctgaagaagcacgtttgaaagaatttagaaaattaggcgtagaatacgaaatggctaaactgaaaaatgatttagcagagttcaatacgcattttgataattggtttagtgaaacatctttatatgaaaaaggcgaaattcttgaagttttagcaaaaatgaaagaattaggttatacgtatgaagctgatggcgctacatggttacgtacaactgattttaaagacgacaaagacagagtattaattaaaaatgacggtacatatacgtatttcttaccagatattgcgtaccacttcgataaagttaaacgtggtaatgacattttaatcgatttatttggtgctgatcatcatggttatattaatcgtttgaaagcatctcttgaaacgtttggtgtagatagtaatcgtttagaaattcaaatcatgcaaatggttcgtttaatggaaaatggtaaagaagtgaagatgagtaaacgtactggtaatgccattacattaagagaaattatggacgaagttggcgttgacgctgcacgttatttcttaactatgcgtagtcctgatagtcactttgattttgatatggaattagcgaaagagcaatctcaagacaatccagtttactatgctcaatatgcacatgcgcgtatttgttcaattttaaaacaagcgaaagagcaaggaattgaggtagctgctgcgaatgattttactacgattacaaatgaaaaagcgatcgaattgttgaaaaaagtagctgatttcgaacctacaattgaaagtgctgctgagcatagatcagcacatagaattactaattatattcaagatttagcttctcatttccataaattctataatgctgaaaaagtgttaacagatgatattgtaaaaacaaaagcacatgttgctatgattgaagcggtcagaattacattgaaaaatgcattggcaatggtcggtgtaagcgcacctgaatcaatgtaagaacatttatatacactccaacgtagagtttctcgaaagatactttgtgttggagtgtttttttattaggtatgtgacatattggggaatgcttagtatgtgaataaggttaaaggaatccagttggtttgcttgcgcacaattgcataaaagcccaaatcgctaaagctcaagggaggttaaaggaatacagttggcttgcttgcgcagcaactgcataaaagcccctaatcgctaaagctcaaggggggttaaaggaatacagttggtttgcttgcgcagcaactgcataagatcccctaatcgctaaagctcaaggggagttaaaggaatacagtaggcttgcttgcgcagcaactgcaaaagagcccctaatcgctaaagctcaaggggagttaaaggaatacagttggtttgcttgcgcagcaactgcataagatcccctaatcgctaaagctcaaggggctctaaaaggaggatgtaaatgttaggaactgatgaattgtataaattgttatataggcatatgggacctcaaaattggtggcctgctgataatgacattgaaatgatgttaggtgcaattttagttcaaaatactagatggcgaaatgcagaaattgcattgaatcagattaaagaacacacgcattttaatccaaatcatatattagaactacctattgaaacgttacaatcattgatacgtccaagtggcttttataaaagtaaatcactgacgattaaaacattattaacatggttagcacgacatcatttcaattatcaagagattaatgagcgatataaagctgaattaagaaaagaattattaactttgaaaggtattggaagtgaaacagcagatgtcttacttgtttatatattcgaacgtattgaatttattccagatagctatacaagaaaaatatataataaattaggatatgaaaacactaaaagttatgatcaattaaaaaaagtaatcacattaccaaatcattttacaaatcaagatgctaatgaatttcatgctctgttagatgtatttggtaaacattactttagagataaagatataaaaaattatgattttttagaaccttactttaaaaagtaaacgctgtgaagttagatagatgagtttatatgaaatataaaaaataattcactattttcttttagtatgtggacttatataataaatagaagcatataaagaaaaaagttgtttgtttgtgcagcaactgcataaaagcctctaatcgctaaaggtgaagaggctttaaaaaggaacgcagttggatgctaccgcacaactgcataaaagcctctaatcactagagttcaagaggctttaaaggaacgcagttggatgctaccgcacaactgcataaatccctctaatcgctaaagcgaaaagaggctttaaaaaggagatgtgatagtgtgaagaaatcgttaattgcttttatattgatttttatgcttgtcctgagtggctgtggtatgaaagataatgataaacaaagtagcgatgataatggctcgtctaaatcgccgtaccatagaattgtttcgttaatgcctagtaatactgaaattttatatgaattaggattaggtaaatacatagttggtgtttcaacggttgatgattatccaaaagatgtgaaaaagggtaagaaacaatttgatgctttgaatctaaataaagaggaacttttaaaggcaaagccagatctaattcttgcgcatgagtcgcaaaaggcaactgctaataaagtattatcatcattagagaaacaaggcatcaaagtagtgtatgttaaagatgcacaatcaattgatgaaacttacaacacatttaagcaaattgggaaattaacgcatcatgataagcaggctgaacaacttgttgaggaaactaaagataatatcgataaagtcatagattcaattcctgctcatcataaaaaatcaaaagtatttattgaggtttcatcaaagcctgaaatatatacagcagggaagcatacatttttcaatgatatgttagaaaaattagaagcccaaaatgtttatagtgacattaatggttggaaccctgtaacgaaggaaagtattattaaaaagaacccagatatattaatttcgacagaagctaagacaagatcagattatatggatatcatcaaaaaaagaggtggattcaataaaattaatgctgtcaagaatacacgtattgaagttgtaaatggtgatgaagtatcaagaccaggtccacgtattgatgaaggattaaaagaattaagagatgcaatttatagaaaataaaccattctaattataccccttattgctacatgtaataaaaattacatgtttgagataaggggtttttaaaatatatttagtgaatgatagcaacgcgagtatgtgattgctataatgaatgtaattattgatgaaagaaaagagaatgctatgacatttaataaagtattattgagctggatagtcatattgattataacaactagcatatatctattttggcagttgggggatattaatgatgtatttaaccagtctattttaatcaatgttagattaccgagattattagaagcattgttgacaggtatgatattaactgttgcaggccttatatttcaaacagttttaaataatgcattggcagatagctttacattaggattggcaagcggtgctacatttggttcaggattagcattatttttaggattaacaacgttatggattcctgtattttcaataacatttagtttaataacattaataactgtattagtcattacgtcggtattgagccaaggctatccagttagaatcttaatattaagtggtttaatgattggtgcattattcaattcacttctatattttttgattttattaaaacctcgcaaattaaatacaattgccaattatctgtttggtggttttggtgatgcagaatactcaaatgtatccataatagcaatcacatttatcattgcactgtttggtatatttatcattcttaatcaactaaagttattacaattaggagaactaaaaagtcagtccctaggcttaaatgttcaattgattacatatattgcgttatgtatagcttctatgataacggcgataaatgtcgcatatgttggcatcattggattcattggtatggtgataccacaactcattagaaaatggcagtggaaacaatcattaggaagacaattggctttgaatattgtaattggaggacaaataatggttatggcagattttattggtagccatatattgtcaccagtacaaataccggcaagtattatcattgcattaattggtataccagtgttattttacatgctaatatctcagtcgaaacggttacactagcacatgacatttgctaaaataaaaataactataaacataaagagggcataagcgatggatttgaatcaaattaaagcagttgtatttgatttagaaggtacgttgttggacagagttaaatctcgagagaaatttatcgaagagcaatatgaacgatttcatgactacttaattcatgttcaactggcagattttaaaaaagcatttattgagctagatgacgatgaagataatgataaacctgatttatataaagaaatcattaaacgtttccatgtagataggttaacttggaaagacttatttaacgattttgaaatgcatttttatcgttatgtatttccttattacgatactttgtatacactagaaaagctatcgcaaaaaggctttcaaattggtgttatcgcaaatggtaaatctaagattaaacaatttcgattacattcacttggtttgatgcatgttattaattatttatcaacatcagaaacagttggttttcgtaaaccacatcctaaaatttttgaagatatgattgatcaactaggggtattacctgagcaaattatgtatgttggcgatgatgcgttaaatgatgtagctccagcacgagctatgggcatggttagtgtatggtataaacaagaagatgctgaaattgaaccactcgaagaagaagttgattttacaattacaacagtggaagaattattaaccattttaccaataaaaattgataataaaggagaaaattatggatctatttactagaaaagatggaacatcgatacattacagtacattaggtgaaggctatcctatcgtattgattcatactgtacttgataattattctgtgtttaataaattagcagcagaattagcaaaatcatttcaagttgtgttaattgatttacgtggacatggctattctgataaacctcgtcacattgaaataaaagatttttctgatgatattgttgaattacttaaatatctatacattgaagaagttgcatttgtatgccatgaaatgggtggaattattggtgcggatatttcagtacgttatcctgaatttacatcatcacttatgttggtaaatccaacatctattgaaggtgaattaccggaagaacgtttatttagaaaatatgctcatattattcgaaattgggatcctgaaaaacaagataaatttttaaataagcgtaagtattatcgtccgagaaaaatgaatcgattccttaaacatgtcgtagatacaaatgaaatatcaactaaagaagaaattcaagcagttaaagaggtattcaaaaacgctgatatttctcaaacttatagaaatgtcgtagtaccgacaaaaattattgcaggagaattcggtgaaagaacaacaagattagaagctaaagaagtagctgatttaatccaaaatgcggactttgaagtatatcaagaatcaagtgcattcccatttgttgaagagcaagaaaggttcgtcgaagatacagctgcatttatcaacaaacatcacgatgaaaagcatgtttaatttttagtgataagtgaaatataaaagtagtaattattatttgtaatataattgtaatatgactgttgttttagaaatgattgttgtataatggttgtgagcacaagacgatataaataaaaggagagagtgcttatgaaaaagctactaacggcaagtataattgcatgttctgttgtaatgggagtaggcttagcgaacactagtgccgaagcagcaagtggcaactctattgatactgttaaacaattaattaagggtgatcagtcattagaaaatgtgaaaattggcgaatctattaaagatgttttaactaagtacaaaaatccgatgtattcttacaatgaaaatggaactgaacattattacgaattccatactaaaaaaggtatgttattagtaactactgatggtaagaaaaacaatggtaaagtaactcatatttcaatgatgtataatgatgctaatggtccaacatatcaagctgttaaaaattatgttggcaaagcagtaacacatacggaatatagcaaagttgctggtaattttggatatattgaaaaaggcaaaacgacttatcaatttgcctcagcaccaaaagataaaaacataaaattatatcgtattgatttggaaaaataataattaaattaatcgtgcttaaccgacaagttaaatcgcaatacttgtcggttattttattacatggcataatacagtgaatattaatttttatgatttgcgaaggggatattaaaccaatacaataaataaagatgtttcattttaaaggagtactaccaatgcgtattaacgataaaattttactagaaaatatagaagattactttaatcataaaggtttatcaccgcatttgattgatgatattaaagagaaagtaattactgatataaaaaattctgaaaagaaagatcaagattatattgaatataaaagaaaatctccagcacaaatcatattaatgattcaaaggaatttgtttgctttacaaatgaatccagttattttctttattttaaatttcattctcatatcctatttatatgataaacagtatgttcaatttcaagctattactggaatgagtctattttattgtttagtgatttttccaatgactattgttgtatacctaagggtgtcacaaaagaattacttgcgtagtaataaaatagaaatgattatgggtacaattatcgctatcatatccctgttattaattatattacaagcatttaatattacatggggcgttataccaattacaaattttggacatcaatttttctttttcattggtattattttagtaattgccggcattttttataagcgacttgagttttcgggaatcggcttattattttgtcaaaaaaccttagatgcaatgattcataatccacaatcagcccagactttttcattaattatatggatattattagtagttctagttatatatttcacaattagattatcttcacgtacaagattataaatatgataaaactattcacttgattaattgtattaattgagatgaatagtttttttattgttggaataacttttggtaatttataaataatttaaaaaaattgtttataaaatggaagcgtacatagaatgaaggttgggtatatagtttattgagggaggtgtcacaatgaataaagtcacaattaatcctcaaatccaattaacttatcaaattgaaggtaaaggggatcctataatattacttcatggattggatggtaatttagctggatttgaagatttgcaacatcaactagcatcatcatataaagtacttacttacgatttaagaggtcatggcaagtcttctaaaagtgaatcatacgatttaaacgatcacgttgaggatttaaaaattctaatggagaagttaaatattcatgaggcacatattctaggacatgatttaggtggggtagttgctaagttatttacagataaatatgcttatcgtgtaaaatcattaactaccattgcatcgaagaaagatgacttaatacacagctttactcaattgttaattcaatatcaagatgatatagcgggttttaataagtctgaagcgtatattcttttattttctaaattgtttagaaatcaagagaagacgatgaaatggtatcaaaaacaaagaatatatagcattaagtctgaggatgatagtgcggtggcaattcgttcattaattttgcataaagatgaacctatgtatttaaaaaaacgtacatgtgtacctactttgttaattaatggggaacatgatcctttgattaaagataagaatcattttaaattagaatcgcattttttaaatgtaacgaaaaaaatcttcgaacattcaggacatgcaccgcatattgaagaaccagaagcatttctaagttattatctcaatttcttaaaaagcgtatcataatatgtgatatatcaacctagggcataaagtccttaggcaatgtgaaaaagctgattactactcattatttgatagaaatcagctttttttgaaatgtatttgatatatactgctcgttatacggctatcttccttatattaagtgctattagtgcaaaacctcttaacaattaggtaaaaaaagacataaaaaaaggaagtttaatagaatgtatcatctatcaaacttcaccaaattgcgctaaacaaaattatagttcaatttcgttgtttgcttcagtgattcgtttatttactcgactcaataatgattcgatttttttacgttgttgtgcattaacaagaattaatacagttctttcatcatgctcattacgttttttatcgaagtaatcttcttgagataaaattttaactgctttaacaacttgtggttgtttgtagtttaaatgattaataatatctttaagatagtattctttctctttgttttcgctgatgtatgtcaatacagcgaattcttcaaagctaattgaaaattcctttttaattaaactttttaatttgtcagcataagtgaccattgataacaactcaaagcaatcattgatttttgtaattgccatgtttaaaacctccctatttgatgcatcttgctcgatacatttgcccgataatatattgatatctaatctttatttattatagatatgttagtcataattttgcattaaataagttttattaaatatatttaatgctctattatttagttaattataactaattaaaaatgagaagtaaacaaaaaagtgtttataaaacaaattattcattagacacagtgattgtatttctgggttagcatttggattagtcaaaaagatcagcattttttataatttaccttaatttaatcgtcagtacaaggtaatttatttaatgaaacgatttagcgcaattaaatgtttcaatattcaatgtgtatctaaagtgattcattgtcatagcttaacgcttttaagttaacttcttctaatatttatacccatttttcgaacttttatcactaaaaaagaaaaatttttataatttttttaatttagtaattctcagtgcagttttaatgataagaaaaacacacttttttaatgacaaaagtaaaactatagcactttaaagtaaatgtatagtaatccgattgataacaagtaatcaatattagaaagtacgattatggttcataatttaaagcatcttcaatctttaaagtcgactcaatgaatgaattaaagttgtacattttgacttatttttaattaattgaataaccaactatgaaatattagcacgaataacataatttttgctattaatttggtgtaaattattaaaaaataacattaatttaggtcttaagaatgagttgactatcgaatttgctaaattaaaatttgttgtgtcaatgcatactacccatattagtacttattaaaactaatttagactgcaaaaaaatagcttatcacttttaaaaataattacaagttaaaatgataagctaaaagttaatttaaaataatcttaaaagtataatgcctgtcaaaatacataatagaccaatagtttttctggatgtcattgctattttaggtgaaccaaataatccaaagtgatctatcaatatgcccattagaatctggccaaacatcccaataagtgttgttaatgctgcacccatatgaggcattaagataatgttagctgttacaaaagccatgccaagtataccgccagtaaaatagataggttttaatttaccgaattttaaatgacttgtttttagttttaaagaacgattaaaaatagcggttaaaatcaacaacgttattgacccaattgtaaatgatactaatgatgcaaaggctggtgaatgagtatgacttgctaataaactgttaatggtcgtttgtataggtggaaagaaaccaaaggtaaaacctagcaaaagccaaaatattaaatgcttttgattcgttaataatatattacacttgttgatttgattcattgtgatgataccaacaattaatagtagcaccccgattgctttaattaaattaaaatcatgaattgtagcaccaaataagccaaatgtatcaataatgacacccataataatttgacccgcaactgttgcaatgacagttaatgttgcacctaattttggcaataacaataaattgccagttaaatagccaacaccgagtaatccgccaacgaaccaagtatagttgaatgtttgattactaaaaaagtgtaatgagaaaacgtcaggatttataaaaatatttaagacgattaagcatatagtacctactgaaaatgaaataaatgatgtatagaaaggtgatttagtataaagtgatagtcttgaattgacagaggtttgtatagggataaacattccaactatgaccccaatgatatagaaaagaagcatatgaataaagtctcactttccaaagttaataataaaaaacatatgtatagattatcactatagagaaaaaatacaactcatttttaagagagataaaagtaaagcgagtcccataataataccccagtcaatcaagaagaaagactggggcgttaatgattatattcaatgaatgactacctatgtttgagactatttctttgcttcaaataaaacggtcgtcgttttatcaataatttgagcagaatgtactttggtgatagcgccactattagactttaaaatatttaaatctactaatgcattcatactatcacgtgcaacttgctcggttacgatgttgtttaattgtggtaattgcaatttgacaggtttgtctaatgaagatttaaaacttaattcaagtgttttggtcatgaaagtgtcctcctgattaaattgattcagatttgatgacttcgatgttgttgtatgtttctccagtaagtcgctcgataagtttgctaaatgttttaatttggtcgtttgatacttcaggattaatattggcgaatcgacgtttaaattctgtttgtttaccatttgtatctagttttgtaaatgataatacaattgtaatgtgatttgttttactcatattttaaaacctcctttcacactatatatcgaaagaaaaaaataattgggttaattttattattcttgtttaaattctataaaaaaggttataattatatgtgacttaaatacttaatgtttatgattaagacacttaaagcaaggagggacatatgaacaaggtagaagtaattaaatgcaatgatgatattaataaaatgtatgacgcgctcaaagctcgatctgatagggattatttgttttttaaattagctatacatagtggtatgaaaataacagaattattaacaattactgttgaagatactaaacgactgattgaaaaggggacactaagcgaattgtgtaaatcccattatcactcattgattaaaattagattgccagaaacattatctaatgagttacttcattatattgaaaacaaaagtctgtcaaatgaagatgtattatttcaatcattgagaactaatcaagtattatctaggcaacaagcctatcgtattattcatcaagcagcaattaaggctggcatagagaatgtaggactaacgacattgcgtaagacatttgcgtatcatgcatatcaaaagggcatacctattcctgtcattcaaaagtatttagggcatcaatcagctatagaaacattgaattttatcggtttagaaaatgaatgtgaacacagtatttatatttcattacaattataacgacaaaggaggctaataatgagtttggtttatctattaattgccatactagtaattatggcgatgatattatttacatctaaacgtagagcaatggctaaatatgcaggatacatagcgctgactgcacctgtaatagcatctatttattttttgttacaagttccatcagtaattaaacagcattatttgtctgtttccattccgtggatgacctcattagatattaatctagatttacgtttagatggtttgagtttaatgttttcccttattatttcacttattggaatcgctgtattcttctatgcaacacaatatttatcctctcgtaaagataatttaccaaggttttacttatacttaacgctatttatgtttagcatgctcggtattgtattagctgataatacaatattaatgtatgtgttttgggaactaactagcgtatcatcatttctattaatttcatattggtataacaacggagatagtcaatttggtgcgatgcaatcatttatgattacagtatttggtggtttggcattattagttggttttatcatgttgtatatcatgacaggaacgaataacatcacagagatattaggacaagcagatcatattaagaaccatgctttatttatccctatgattatcatgtttttattaggtgcatttacaaagtctgcacaattcccatttcatatttggttaccaagggcaatggcagcgcctacacctgtaagtgcatatttacattcagccactatggttaaagctggtatctttttattacttagatttacacctttgttaggtctaagcaatatgtatatttatatcgtaacctttgtcgggttaataactatgttatttggctcaatcacagctttaaaacaatgggatttaaaaggaatcctagcatattcaacaatcagtcaattagggatgattatggctatggtgggtataggtggcggatatgctcaacaccaacaagacgcaatagcatctatttatgtatttgtgttatttgcagcattgttccatcttatgaatcatgccattttcaagtgtgcgcttttcatgggtgtagggattttagatcatgaagcaggttcaagggacatacgaattttaagtggcatgcgccaattatttccaaaaatgaatctagtcatgacgatagcggctctatctatggctggaataccatttttaaatggatttttaagtaaagaaatgttcctagatgcattaacacaaactggacaattgtcccaatttagtttgatttcaatgattatcatcgtatgtatgggtgttattgctagtatttttacattcacatatgcactttacatggttaaagaagtattttggactaaatatgattctaaagtgtttactaaaaaaaatatccacgaaccatggttgtttagtttaccctctcttatattaatggtgctagtacctgtaatcttttttgtgccaaatatatttgggaaggggattatcgttccagcattaagaggtgtatcaggtggtaatcatcaaattgatccattggtaccacatgtttcgcaatggcatggatttaacataccgcttcttttaaccatcatcattattttattgggtagtgtactagcaatcaaagtagattggaaaaaagtgttcacaggtaaaattagacaaatttcagtttcaaaagggtacgaaatggtttaccgacaatttgaaaagtttgctacgaagcgatttaaacgtgttatgcaagatcgtttaaatcaatacattattatgacactgggcatatttatggtaatcatcggatacggttatattcgtataggactaccaaaagtacatcagttacatgtttccgaatttggaccgttagaagttatattagcaattgttacagttatcattggtttgtcattaatatttatacgtcaacgactaaccatggtcattttaaatggggtcattggttttgttgtaactttattctttatagcaatgaaagcacctgatttagcattgacacaacttgtggttgaaacgattacgacaattttatttattgttagcttttcaagattacccaacgtaccaaggtctaaagttaataaaaaacgagaaataattaaaatttcagtatctcttatgatggcgctgattgttgtgtcacttattttcatcgcgcaacaagcagatggattggcatcgatttctaatttttatcttagagcggataaattaacaggtggcaaaaacattgtgaatgcgatattaggagactttagagcattagatacattgtttgaaggtttagtattaattattactggattaggtatttacacattattaaattaccaagataggaggggacaagatgaaagagaatgatgtcgttttaagaacggtcacgaaactcgttgtatttattttattgactttcggattctacgtcttcttcgctggccacaataacccaggtggtggctttataggtggtttaatatttagttccgcgtttattttaatgtttctagcttttaatgtcgaagaagtattagaaagcttaccgatagattttagaattttaatgattattggtgccttagtttcatctattactgcgataatgccaacattttttggaaaaccttttttgtcgcaatatgaaacaacattgacactaccaattttagggcacattcatgtaacgacaataacactgtttgaattgggcattttgttctcggttgtcggggttattgtaacggtgatgctgtctcttagtggaggtcgatcatgaatttaattttattactagttataggatttttagtatttatagggacatatatgatattatctataaatttaattcgtattgtcataggtatttcaatttatacacatgctggtaaccttattatcatgagtatgggcacttacggctctaataaatcagaaccgctgattacaggtggaaatcaattgtttgttgatcccttgttgcaagctattgtactaactgcaatagttataggttttgggatgactgcgtttttacttgtcctcgtttatagaacttataaagtaactaaagaagacgaaattgaaggcttaaggggggaagatgatgctaagtaatttgttaatattaccaatgctattaccattcctttgtgccttaatccttgtatttttaaaaaataatgaccgtatttctaaatatttatacttaggtacaatgactatcaccacaattatttcattaatgctattaatttatgttcagcgtcatcgtccaattacattggattttggtggttggactgcaccatttggaatacagtttttaggagattcgttaagtttaatcatggttacaaccgcttcgtttgtgattactttaattatggcatatggatttgggcgtggcgaacataaagcaaatcgttatcatttaccttcatttatattatttttaagtgttggtgtgataggctcttttctaacatcagatttatttaatttatacgtcatgtttgaaattatgttactagcgtcatttgtactcattacacttggacaatctgtagaacaattacgtgctgcaattatttatgttgtcttgaatattattggttcatggctattcttattaggtataggtttactttataaaacagtaggtacattaaacttttcacatattgcaatgcgtttgaatgacatgggagataatcgcactgttacaatgatttcattaatcttcttagtcgcatttagtgcgaaagcagcgctggtcctttttatgtggctaccgaaagcctacgctgtgttaaatactgaacttgcggcattatttgcagcgttaatgaccaaagtgggcgcttatgcattgattcgcttctttacattattatttgaccaacataatgatcttatacatccattgctagcaactatggctgctataactatggtcatcggcgctataggtgtcattgcttataaagatattaaaaagattgcagcttaccaagtcataatctcaataggatttatcattttaggtttaggaacaaacacgtttgcaggtattaatggtgcaatattttatttagtaaatgatattgttgtaaaaacattgctattctttattattggtagtttagtttacattactggttatcgacaatatcaatatttaaatggtttagcaaaaaaagaaccattctttggtgttgcatttattataatgatttttgctattgggggcgtaccaccatttagtggttttccaggaaaagtacttattttccaaggtgcattacaaaatggcaattatataggactcacgttaatgattattactagtttaattgctatgtacagcttgtttagaatacttttctatatgtattttggagataaagatggcgaagaagttcattttaagagaatcccacaatatcgtaaaggtattttaagtattttagtagttgtggttatcgcaatcgggattgcagcgcctgtgctgttaaaaataactaatgatgcaacagagcttaatacgaacgatcaattatatcaaaagcttgttaatccacatttgaaaggagaggaataaatgaatcaaattgttttaaatattatcattgcattcttatgggttttatttcaagatgaagatcattttaaattctcgactttcttttctggatatctaattggtttaattgtcatttatatattgcacaggtttttcagcgatgatttttatgttagaaaaatttgggtagctattaaatttttaggtgtttatttataccaattaataacatctagcattagcacgattaattatattctttttaaaacaaaagatatgaaccctggattactttcatatgaaacaagactaacaagtgactgggcaataacatttttaacaattttaattattataactccagggtctacagtaatacgaatttcccaagactctaaaaagttttttattcatagtatcgacgtgtcagaaaaagaaaaagatagtttgttaagaagtattaagcattatgaagacttaatattggaggtgtcgcgatgatacaaacaatcacacatattatgattattagttcactcattatttttggaattgcattaatcatctgtttatttagattaatcaagggacctacaacagcagatcgtgtcgttacatttgatacaacaagtgctgtagtcatgtctattgtgggtgtcttaagtgtactaatgggcaccgtttctttcctagattcaatcatgctcattgccattatatctttcgtaagctctgtatcgatttcaagatttattggtggggggtatgtgtttaatggaaataacaaaagaaatctttagtcttattgcagctgtgatgttgttgttaggtagttttattgctcttattagtgcaataggtatcgtaaaattccaagatgttttcttaagaagtcatgctgcaacaaaaagttcgactttatccgtgttattaactttaatcggtgtattaatttattttattgtgaatacaggatttttcagtgtgcgtttattactgtcacttgtttttattaatttaacttcacccgtcggcatgcacttagtcgctcgcgctgcttatcgcaacggcgcttatatgtatcgaaaaaatgatgatcacacacatgcatcaatattattaagttcaaatgaacaaaactctacagaagcattacaattacgtgctaaaaaacgagaagagcatcgtaagaaatggtatcaaaacgattgaagtgttgcctaaattgttaagcataacaatgcttttgaagatttgttttcaaaattaatcattaaaagagtactttgaaattggttagtcgattttaaggtgctcatttttttattataagttaatgttgttatgtgaaagcaagttgtttatttatacaaacaattagtgataaaataaaattaaataattgcaaatttaagtactgcaatcgtagacatatatctatattaaagtgcttttgtggtcgctaactcaatttatcctctaaagtataattacaacgagatgtgatacttatttttcaattaaacaatactttttagagaggtgaaagtttggaaatatttgaaacaattcttatatttatagctgttgtgatactaagttcgtttgtccatactttcatacctaaagtacccctagcatttatacaaattttcttgggcatgttactatttattaccccaatccctgttcaatttaattttgattctgaattgtttatggtaacaatgattgcgcctttgttatttgtagaaggtgttaatgtttctagagtccatttaaggaaatatattaagccagtgatgatgatggcattaggattagtcattactactgtgataggtgtcggtttatttattcattggatttggccagatttacctattggagcagcatttgcaattgctgccattctttgtcctactgatgcagtagcagtgcaagcaattactaaaggaaaggtcttgccaaaaggagcaatgacaattcttgaaggtgagtcattattgaatgatgctgctggtattatttcatttaaaatagctgttggagtattagttacaggtgctttttcacttgttgatgctgttcagttgtttttaattgcatcaattgggggcgcagtggttggtttacttataggtatggcattagtaaggttccgattaacattgatgcgtcgaggatatgaaaacattaatatgtttacaattattcaattgttaacaccatttgttacgtatttaattgctgaattgtttcacgcatcaggaatcattgcagcagtagttgcaggacttgtacatggtttcgaacgtgacagaattatgcaagtacgtacacaactacaaatgagttacaatcatacatggaatatactaggttatgttttaaatggctttgttttttcgatactaggatttttagtacctgaagttattattaaaattatcaaaacagaaccgcacaatttaatctttttaataggcatcactattgttgttgctttagctgtctatctatttagatttgtttgggtttatgtcttatatccttatttttatttagccatcagtccattccaaaaaatgatgactaaaaatgatgatgataatccaacgactgagaaaccaccaaagcgaagtttatacgctttaattatgacgttatgtggtgtgcatggaacaatttctttagcaatcgcattaacgttaccgtattttttagcaggacatcatgcttttacgtatagaaacgacttattatttattgcatctggtatggttattattagtttggtagttgcgcaagtattattgccattattaacgaaacctgcacctaaaacagtaattggtaatatgtcgtttaaagttgctagaatttatatattagaacaagttattgattatctaaatcaaaaatctactttcgaaacaagttttaaatatggtaacgtgattaaagaatatcatgataaattagcatttttaaaaactgtagagaaagatgatgaaaactctaaagaattagaacgtctacaaaaaattgcttttaatgtagaaacaaaaacattagagtctttagtagatgaaggacaaataacgaatagtgtacttgaaaactatatgcgttatgctgaaagaacacaagtatatagacaagcatcattaataagaagaatgattgtattattacgaggtgctttattaaaacgaagagtacaaacgagagtgaactcggcatcttcacttagtgttacggataacttaatggaattaaataaaattaataaattagtccattataatgtggttagtcgtttgtctaaggaaacaacaaaagataatacacttgaagttggaatggtttgtgacggttatttaatgcgaattgaaaacttaacaccatctaatttcttcaactcagcaagtgaagatacgattactaaaattaaattaaatgcattgagagaacaacgtcgcattttacgtgagttgattgatacagatgaagtatcagaaggtacagcgttaaaactaagagaagccatcaattatgatgaaatggttattgtagatagtatgacgtagttcgtaattatgctaaaagggattgatgaaaaactgaatggattttcatcaatcccttttattttaggggaattgaatagatagttttaaactatacgaattattactatttgagatttaattgaaataagttttaaaaattggaggagatagattaatcgaagtcatttaaagatgaagataagtgcattcacaaaagatagccacactcatatgacatcggatgagtgtggcttaaggatctatggggggaggaaaccatagatgtttactttgataggccagattaaatatcaaagtatgcgattatttatagcttgatgcaaaagtggtatgcctattaaaagttactgcacatagcttttaatattccgttcaaaggaaaggggcatacaattgaacaatctgtaatagtacttttaaccagctatgctaaaagtctagtagggagaacagttgtccaatcacataagaacctctaacttcgttagtacgattaagaaaagctttttagttagtatgtaatacaatttattgacgcgcgtgaatctcttttataagagtgtgtagggaatggcgttgtataaattgtattagaagaacttctaacgcatctctgtggttaaaagagatgaagggaacgacagtttaattaaaaccacataaagctttcaactttgctctttgatttaaagagtgacaaatgtttatagtttaattaaaactgcataagaacttctagcttttctctctcgctcaaagagaggcagctgttcgcagtttaattaaaaccacataaaactattagcttcctctttgatttaaaaagtgataaatgtttatagtttaatcaaaactgcataagaacttctagcttttctctctcgctcaaagagaagttctaataccaccatatcgtgcgatcgggaacggtatatatattaataggagggtaatatatatttaacgcacgatatgggactattagccttcgactttgttatgttgatgtgtagcctaaaatattggagataccaatattttaggttgcatcaacatcaattcatcttacttcattaaaacacagcgtgttatttcatgcttccgtgtacagtttcaatatttgatttcatcattttgtagtaagagtcacctttagtgccttctttaccgattgaatctgtgtacacttcaccaaagatatctttcttcgtttcttcagataaactttccattgctttcttatcaacacttgtttctactaataagtgttttaatttgtgctttttaacaaactcaatagcttgtctcatttgttctggtgtaccttgtttttcagtgttaatttcccaaatataacctggtgtaataccgtattgttttgagaagtacttgaaggcaccttcacttgtaatcatggcacgttgttcttttggaatgtcattaaatttgtctttactgtcgttatttaatttttccaattgagcaatgtatttgttaccttgcttttcataatctgctttatgttttttgtcgttatcgataaatgtttgttgaattgtttttacgtatttaataccgttatctaaacttaaccatgcgtgtggatcttgtttatctttgttgccttcttcaccgtttaaatagataggtttaacatcttttgatactgcgataacttttttatcttttaatgatttaccagcctgttctaaggctttttcaaaccaaccgttaccagtctctaaatttaatccgttgtataaaataacgtcagcgtcagttaactttttaatatctttaggtttaacttcatattcatgtggatcttgaccaacaggtacaatactatgaatatcgacgttgtctccaccaacatttttagccatatcatataaaattgaattcgtcgttactacttttaatttgccatttgacttatcactgctttgtttaccaccagtaccacatgcagcaactagaagtaataaggctaataataaaggtactaattttttcatgttaaacttcctcgtttctttctattcgtaaattttgtgaaaaataatgtgatgatataaattacaaacgtacaaagtacgattgttgcaccactaggaatgttgtaaatatagctgtaataaagtccgacaattgaacttatgacacttattaaacttgctataatcatcattgagtatagttttttactaattaaaaatgctgtagatgcaggtgtaattaataatgcaactacaagaataatacctaccgtttgaatacttgctactgttactaatgagagtaacaacatcacaaagtaatgtaataacgtcgtatttagaccactcattctactaaacgttggatcgaatgtagaaatcattaatggacgatagaaaataatgattagaataaggacgattgaaccaatcacaatagttgttaaaaatgcactatttgtgattgccagtaaattaccaaacagaatatggtacaaatctgtcgtagtgtttattaagctaataataataatccccgaagctaagaaagcggtaaaactaattccaatagcggcgtcaggtttcgttttactactagatgtgatataaccgataaaaatacttgcgatcataccagttataagtgcgcctacaaacattggaataccaaataagaatgatagggcaacaccaggtaatactgcgtgactcattgcatctcccattaatgaaagaccacgtaatacaattaaactaccaactgtaccacaaactatccctacaataattgaagttatcaatgctcgattcaagaattgatatgtaaataaatgttcgacaaactctaacatgttatattgctcctttgactagggtcactacagtcagtgctactcataaatgtttcgtttaagcgagtgacactcatagcctcttcactatcaccaaagtatcgtaatgtttgatttaatagaataatgcgatcaaagtattgctttgcttttgatagatcatggtggatgataagaataagttttccttgttgttttaagttctcgatttttgtcatgattaatttttcgctactaaaatcaattccgacaaacggctcatctagaaaataaacttcactttcggacatcaatgctcttgctactagcacacgttgtaattgtccaccacttaattctgaaatttgtcgatgacgtaaagattctaattctaaatcgcttaataactgtttgagtttatcccttgctgatttattaggtcgtctaaaccatccaatttctttgtagcaacctgataaaatcacttgttccacacttataggaaaatctaaatcaatatgtgctttttgtggaatatatgtaatatgttgcagttgttgttgtataggtttgttatataacaatttagtaccggtagcattaaattcaccaattaaagacttgataagggaagatttaccagcaccattcgggcccatgataccaattatttcgccgcgtactggtatcgataaggaaatgtttttaagtacatgcttattacctaaaaacagatttaaatcttttgtttctaacaaacgtttatacctcctaattaaaagtttaggctaacctaattaattgtataataaactgagaatatttatcatgtcaagtaaattcgtgatataatatagacaatgtatgtgaggtgaaagtatgttaactgaagaaaaagaggactatttaaaggcaatccttacgaataatggcgataaaaactttgtgacaaataaaatcttatctcaatttttaaatattaagcctccatctgtaagtgaaatggtaggacgtcttgaaaaagcaggctatgttgaaacaaaaccgtacaaaggtgttagattaacagaggatggtttaacgcatacgcttgatatcattaagagacatcgactattagaattatttttaatagaaatattgaaatataattgggaagaagtacatcaagaagcagaaattttagaacatcgaatttctgatttatttgttgaaaggctggatagcttgttaaatttcccagaaacttgcccgcacggcggtgtgattcctagaaataatgaatataaagagaaatatataacaacgattttgaattatgaacctggcgatatcgttacaatcaaacgtgtgagagataagaccgatttgctaatatatttgtctagtaaagatatttctattggtaatgaagtggaaattgtatcgaaagatgaaatgaataaagtaattatcattaaacgtaatgataatgtaattattgtcagttacgaaaatgcaatgaacatgtttgctgaaaaataaaataaagaagccataaagatatccatgattgtactgataaagacatatggataattgctttaggcttcttttttattagttaatttatcaagtgagtatatttgagtaaaatattcactgcataaagattgaagataatccagattgtactataaatgaagataggtacatgactgagttctttaagtgcactaccatcccactgtggactcggacgctggaaagtcaatttagcaatcgtccaactagattgtagaacttcgcctaacaatacacctaaaatatattgataactcattgtgacaagtagttgaatttctactatattttcatcttttaatataaaatacaacatgatagaaattaaagttataacaacaatgggtgagccttttctagatgttaaaattaaaaaataaataaatatcaataaataggtaaatataaaaaaactaggtatctgataatggctcgacgctaaacctatcaataacataataggtggcataaaataaccaccaatcgttgtaagccattgaccagctagatgtctagattgtgtaattgcgaatccttgttgtaatgtctgttgtcgctctcgtggacttgttacaatgactaaatcttttgcacggccaccagcgagtttattaaacagtacatgaccaaattcatgtgttaaaacagggatatagtttaaaatgacatctaaatagttcaaaacaggcttatgtctatattgatgaatagcaatataacaagctgcaacaataacgataatgtatatattaagttgaattgtcgtattaaaaaagtttgataaataattcattgttaacctcatataagatattaatttaaagtttgcttatcacttattataaatgatattggcatcaatagcgttagactttagacttaccttagttaaactaattttaatttttgaaaaggtgaatatgtgttaaaataaagcaaaatcatttcgatataaataggatgaatataaatactgttaatattgattacactaacataataatgaaataagataggagattcctgttatgactgttgaagaaagatccaatacagccaaagttgacattttaggtgtcgattttgataatacaacaatgttgcaaatggttgaaaatattaaaaccttttttgcaaatcaatcaacgaataatctttttatagtaacagccaaccctgaaatagtgaattacgcgacgacacatcaagcgtatttagagttaataaatcaagcgagctatattgttgctgatgggacaggagtagtcaaagcttcgcatcgtttaaagcaacctctagcgcatcgtatacctggtattgagttgatggatgaatgtttgaaaattgctcatgtaaatcatcaaaaagtatttttgctaggggcaactaatgaagttgtagaagcggcacaatatgcattgcaacaaagatatccaaacatatcgtttgcgcatcatcacggttatattgatttagaagatgagacggtagtgaaacgaattgaactgtttaaacctgattacatatttgtaggtatgggattccctaaacaagaagaatggattatgacacatgaaaatcaatttgaatctacagtgatgatgggcgtaggtggttctcttgaagtatttgctggggctaaaaagagagcgccttatatctttagaaaattaaacattgaatggatatatagagcattaatagattggaaacgtattggtagattaaagagtattcctatatttatgtataaaatagccaaagcaaaaagaaaaataaaaaaggcgaaataatcatgatgacaaaaataaaaccgaggaaatccttaaatggagattctcggttttttagtttatttaataacgaagcgggactcatcgagtttgtttctaaattctttttgttcggctttggatttctttttaaaatcgtttaggaaagcttcatatttaggtaatacatcatcaagttcaccgtaatcttttaactttccgccttcaatccaagcaatcttagtacaaaattgtctcacttggcctaagttatgactaacgaaaaagatggttttgttttgctctttaaactcgtaaattttatctaaacatttttgtgcaaaagtttggtcacctacagataaagcttcgtcaatgactaagatatctggattaactgtgatattaattgaaaaaccaagttttgcacgcataccacttgaatactttttaactggttgataaataaactcaccaagttcactaaattcaataatcttaggtgtcatcgctttaatttctttacgcttaaagcccatacataacattttaaattcgatattttcaatccctgtaagttgtccactcaagccagcactaattgcgataacgctgacttcaccattacgatccacttttccaactgtaggcgacaaagaaccgccaatgatattgctcaacgttgatttgccggaaccattgatgccaacaagccctatgacgtcaccttcatatgcttttaaactaatgtcatctaaagcgaaaaatgttttgtttttatgtttgggaatgagcgcatctttcatacgttctttatttgtacgataaatacgatattcttttgttacatttttaatgtttaccgaaacgttcatttgtagaccttccttattcacatttatctagattataatatactactcaacagttgttaaattttaaaacctgttgtaaagtgtatagaagattttgttattatcagagttggtgttttgacacaaaatgttaatcatcaatgataacaatgatatttaaaaactaaacttatttcaacttacatgattgtatactataatgtatttgtaataaactaatattttaaagaactagacaataattttgatagcatccatgtatagtgatagtatttacaacaattattataatactatttagttaagtagagaaatagttaaacatttgaaagtgtggtttaatggaatgtcagcaataggaacagtttttaaagaacatgtaaagaacttttatttaattcaaagactggctcagtttcaagttaaaattatcaatcatagtaactatttaggtgtggcatgggaattaattaaccctgttatgcaaattatggtttactggatggtttttggattaggaataagaagtaatgcaccaattcatggtgtaccttttgtttattggttattggttggtatcagtatgtggttcttcatcaaccaaggtattttagaaggtactaaagcaattacacaaaagtttaatcaagtatcgaaaatgaacttcccgttatcgataataccgacatatattgtgacaagtagattttatggacatttaggcttacttttacttgtgataattgcatgtatgtttacgggtatttatccatcaatacatatcattcaattattgatatatgtaccgttttgttttttcttaactgcctcggtgacgttattaacatcaacactcggtgtgttagttagagatacacaaatgttaatgcaagcaatattaagaatattattttacttttcaccaattttgtggctaccaaagaaccatggtatcagtggtttaattcatgaaatgatgaaatataatccagtttactttatcgctgaatcataccgtgcagcaattttatatcacgaatggtatttcatggatcattggaaattaatgttatacaatttcggtattgttgccattttctttgcaattggtgcgtacttacacatgaaatatagagatcaatttgcagacttcttgtaatatatttatatgacgaaaccccgctaaccattaataaatggaagtggggttcatttttgtttataatttaagtaaataacatattaagttggtgtattatgaacgttttaataaagaaattttatcatttggtagttcgaatactttctaaaatgattacgcctcaagtgattgataaaccgcatatcgtatttatgatgacttttccagaagatattaagcctatcatcaaagcattaaataattcgtcgtatcagaaaactgttttaacaacaccaaaacaagcgccttatttatctgaacttagcgacgatgttgatgtgatagaaatgactaatcgaacattggtaaaacaaattaaggctttgaaaagcgcgcagatgattattatcgataattattacctattactaggtggatataataagacttctaatcaacacattgttcaaacgtggcatgcaagtggtgcattaaaaagctttggcttaacagatcatcaagtcgatgtgtctgacaaggcaatggttcagcagtaccgtaaagtttatcaagcgacggatttttacttagtgggttgtgaacaaatgtcacaatgttttaaacagtctttaggtgcaacagaagagcaaatgttgtattttgggcttccgagaattaataaatattacacagctgatagagcaacggttaaggcagagttaaaggataaatatggcattacaaataagttggcattatatgtaccaacttatagagaagataaagaagataatagggctattgataaagcttattttgaaaaatgtttaccaggatatacactgattaataaattacatccatcaattgaacattcagacattgatgacgtatcttcaatcgacacatctacattaatgttaatgtcagatataattattagcgactatagttcgctgccaatagaagctagcttgttagatattccaactatattttatgtgtatgatgaaggaacatatgataaggtgagaggcctgaatcaattttacaaagcaattccggatagctataaagtgtatactgtagaagatttaataatgacgatacaagaaaaagaacatctattaagtccgttatttaaagattggcataagtataatactgataaaagtttacatcagctcacagaatatatagataagatggtgacaaaatgaggcttacgataatcatacctacatgtaataatgaggcaacaattcgacaattgttaatctctattgagagtaaagaacactatagaatcctttgtattgatggtggttctactgatcaaacaattcctatgattgaacggttacaaagagaactcaagcatatttcattaatacaattacaaaatgcttcgatagctacgtgtattaataaaggtttgatggagatcaaaatgacagatccacatgatagtgacacatttatggtcataaatccaacatcaatcgtattgccaggtaaattagataggctaactgcagcgttcaaaaataatgataatattgatatggtaatagggcagcgagcttacaattaccatggtgaatggaaattgaaaagtgctgatgagtttattaaagacaatcgaatcgttacattaacggaacaaccagatttgttatcaatgatgtcttttgacggaaagttattcagtgctaaatttgctgaattacagtgtgacgtaactttagctaacacttataatcacgaaatacttgtcaaagcgatgcaaaaagctacggatatacatttagtttcacagatgattgtcggagataacgatatagatacacatgctacaagtaacaatgaagattttaaaagatatatcacagaaattatgaaaataagacaacgagtcatggaaatgttactattacctgaacaaaggctattatatagtgatatggttgatcgtattttattcaataattcattaaaatattatatgaatgaacacccagcagtaacgcacacgacaattcaacttgtaaaagactatattatgtctatgcagcattctgattatgtatcacaaaatatgtttgacattataaatacagttgaatttaatggtgagaattgggatagagaaatatacgaattgtggcgacaaacattaattcaagtgggcattaataggccgacatataaaagattcttgatacaacttaaagggagaaagtttgcacatcgaacaaaatcaatgttaaaacgataatgtgtacattgatgaccataagctgcaatcctatgatgtgacaatatgaggaggataacttaatgaaacgtgtaataacatatggcacatatgacttacttcactatggtcatatcgaattgcttcgtcgtgcaagagagatgggcgattatttaatagtagcattatcaactgatgaatttaatcaaattaaacataaaaaatcttattatgattatgaacaacgaaaaatgatgcttgaatcaatacgctatgtcgatttagtcattccagaaaagggttggggacaaaaagaagacgatgtcgaaaaatttgatgtagatgtttttgttatgggacatgactgggaaggtgaattcgacttcttaaaggataaatgtgaagtcatttatttaaaacgtacagaaggcatttcgacgactaaaatcaaacaagaattatatggtaaagatgctaaataaattatatagaactatcgatagtaaacgataaattaacgtaggttattataaaataaatataaaacggacaagtttcgcagctttataatgtgcaacttgtccgcttttagtatgttttattttctttttctaaataaacgattgattatcatatgaacaattagtgctaatccagcgactaggcatgcaccaccaatgatagtgaataatggatgttctgcccacatacttttagcaacagtatttgccttttggataattggctgatgaacttctacagttggaggtccataatctttattaataaattctcttggatagtccgcgtgtactttaccatcttcgactacaagtttataatcttttttactaaaatcacttggtaaaacatcgtaaagatcattttcaacataatatttcttaccatttatcctttgctcacctttagacaatatttttacatatttatactgatcaaatgaacgttccattaatgcattccccatcatattacgttgcttctcgccaccaaggtttttatagtctcctgcacccatgataacttgattaattctaaatttacctcgtttagtagtaatcgtatggttgtaatttgctgtatcacttgatccagtttttaaaccatctgtaccaggcaaactcatttttgcaccttccaatgaaaagttgaatgtgtaatacgtaactgcatgcgttgttggtgctaactgctttgtaaagtctaatattttaggtgtctctttaatcacgtgtaaatctaaaatggcgtagtctctagcagtcgttacagtacgttcttggtctttatactttgttggtgcaaatgtacgtaatcttgaattttcagcacccgttggattgacgaaatgtgtatttttcattccgatagctttagctttgttattcattaaatcaacgaaatcgctggtgttttttgataccttcttagctaaaattaatgccgcggcattactagaattagatactgtaatttgtaataggtctgcgattgtccatacttgtccaggatatagtttcgtattactcaactcaggtagtgtagacataatatattctttgttcgtcattgtgacagtatcatcaagtgaaagctgccccttatttacagcttccaatgttaagtacattgtcattaatttagtcatagacgctggattccacttagtatcgatattgtattgatacagtaattgtccagtttgacttacattaacagcactcgtcggttcgtatgcagccgacaaacctgcataaccatattgatttgctgcttgcacaggggttacgtcactgttagcagcttgtgcatatggtgtcataatacttaatgttaaacataaaatgatgataatagatattaaatttttcataaagcgttaatcttcccttttccaattcttaaatattccctaaaagcaatggttattcctacttacggaaaccattgctaattcacttcaccttaattaaattgttgaaaataaagttttctgcagttaatttgaaaaataatgcaaatatattacgtgtgtagctaaaggtgttataatgtttgtacgaagagcaaacttactcaaaagcgattaattttcatgttttaatataaagactttgagaagttattacaaaaaatgtaatagaaatattctatcatataaatgttatgagcggtattttggggcaacactttatttgatttttaaagttttgttgggagaaagtatatgatagaaatgcatgcatctatctaaatgaattaactataaatttcaaacagaagaggtaaaactatgaaacgagaaaatccattgtttttcttatttaaaaaactatcatggccagtgggtcttatcgttgcagctatcactatttcatcactagggagcttaagtggactattagtgccactgtttactggtcgaattgtagataaattttccgtgagccatatcaattggaatctaatcgcattatttggtggtatctttgtcatcaatgctttattaagtggattaggtttatatttattaagtaaaattggtgaaaaaattatttatgcgatacgctcagttttatgggagcatataatacaattaaaaatgccattctttgacaaaaatgaaagtggtcaattaatgagtcgattaactgacgatacgaaagtgataaatgaatttatttcacaaaagctacctaacttattaccatcaatcgttacattagttgggtcactaatcatgttatttattttagattggaaaatgacattattaacatttataacgataccgatatttgttttaattatgattcctctaggacgtattatgcaaaagatatcgacaagtacacaatctgaaattgcaaactttagtggtttgttagggcgtgtcctaactgaaatgcgtcttgttaaaatatcaaatacagagcgacttgaattagataatgcacataaaaatttgaatgaaatatataaattaggtttaaaacaggctaaaattgcggcagttgtacaaccaatttcaggtattgttatgttgctaacaattgcaattattttaggttttggtgcattagaaattgcgacaggtgcaatcactgcaggtacattaattgcaatgatattttatgttattcaattatcgatgcctttaatcaatctttcaacgttagttacagattataaaaaggcagtcggtgcaagtagtagaatatacgaaatcatgcaagaacctattgaaccgacagaagctcttgaagattctgaaaatgtattaattgatgacggtgtgttgtcatttgaacatgtagactttaaatatgatgtgaagaaaatattagatgatgtgtcgttccaaatcccacaagggcaagtgagtgcttttgtaggtccttctggatctggtaaaagtacgatatttaatttgatagaacgtatgtatgaaattgagtcaggtgatattaaatatggccttgaaagtgtctatgatatcccgttatctaagtggcgacgcaaaattggatatgttatgcaatcaaattcgatgatgagtggtacaattagagacaatattttatacggaattaatcgtcatgtttcagatgaagaacttattaattatgctaaattagcgaactgtcatgattttatcatgcaatttgatgaaggatatgacacgcttgtaggtgaacgaggattgaaactgtctggcggacaacgtcaacgtattgatattgctagaagttttgttaaaaatcctgatattttgttacttgatgaagcaacagctaatctcgatagtgaaagtgaattgaaaattcaagaagctttagaaacattgatggaaggtagaacaacgattgtcattgcgcatcgtttgtctacaattaaaaaagccggtcaaattatattcttagacaaaggacaggtaacaggtaaaggtacgcattcagaactgatggcatcacatgcgaagtataaaaactttgtagtgtctcaaaaattaacagattaattttatatatataagtaagcttggagcaagtacagatataccatcgagaaaattaaagtgtggcacattgatggatatagatgttaataaattgcttcaagcttttgtctattttaaatcatgtgagaagttacgacataataattcttaaattaatgaaatcgatattttaagaaaaaaatgctcatggtataatacaagttataagcaaacatacatatattaaatactgtagccacgagtcataattcttcatattttacatagcaatttaactgattttagagtccacggtacagaagtttgatatttcaatgtttctaaatttttaaaaaattaaatcataggtgggtgccaaatgtttttattaatcaacattattggtctaattgtatttcttggtattgcggtattattttcaagagatcgcaaaaatatccaatggcaatcaattgggatcttagttgttttaaacctgtttttagcatggttctttatttattttgattggggtcaaaaagcagtaagaggagcagccaatggtatcgcttgggtagttcagtcagcacatgctggtacaggttttgcatttgcaagtttgacaaatgctaaaatgatggatatggctgttgcagccttattcccaattttattaatagtgccattatttgatatcttaatgtactttaatattttaccgaaaattattggaggtattggttggttactagctaaagtaacaagacaacctaaattcgagtcattctttgggatagaaatgatgtttttaggaaatactgaagcattagccgtatcaagtgagcaactaaaacgtatgaatgaaatgcgtgtattaacaatcgcaatgatgtcaatgagctctgtatcgggagctattgtaggtgcgtatgtacaaatggtaccaggagaactggtactaacggcaattccactaaatatcgttaacgcgattattgtgtcatgcttgttgaatccagtaagtgttgaagagaaagaagatattatttacagtcttaaaaacaatgaagttgaacgtcaaccattcttctcattccttggagattctgtattagcagcaggtaaattagtattaatcatcatcgcatttgttattagttttgtagcattagctgatctatttgatcgttttatcaatttgattacaggattgataggaggatggataggcataaaaggtagtttcggtttaaaccaaattttaggtgtgtttatgtatccatttgcgctattactcggtttaccatatgatgaagcgtggttggtagcacaacaaatggctaagaaaattgttacaaatgaatttgttgttatgggtgaaatttctaaagatattgcatcttatacaccacaccatcgtgcggttattacaacattcttaatttcatttgcaaacttctcaacgattggtatgattatcggtacattgaaaggaatcgttgataaaaagacatcagactttgtatctaaatatgtgcctatgatgctattatcaggtatcctagtttcattattaacagcagctttcgttggtttatttgcatggtaatatgtcgaagagtgactacgataatacattttaactaaaaaagatgtccaggcatgtcgtctattgatataggtgagatgcttggacttttttattattgatataaagatatttaaatatttttaaagttaccgaaattgatgcaatataaaaaccaagtgcacatggtaatacacttggcttttatgggaaatgaatattattgtacatatgacagtaaggactaggtacagtcatagtacttcgagcaaaatttgttttgttattataaacaacacaaaggagataacttctctattgaagaagttaaaaacattatagcagacaatgaaatgaaagtaaattaaaaattcagaatatttttaattattatattgtgagtgatatttattagggaaagctattcttcatataaattagttaaatagtaaatctttgttagaactctttccatagagttgtgacagtatttttgttgtgctactatttttatagtctaataaatatacaaaggggatggtttcgtgaataaaacggttaaagatttaatactagttgtcttaggttcatttatctttgctgcaggcgtaaatgcatttattatttctggtaacttaggtgaaggcggggttacaggtttagcaattattttatattatgcgtttcatatttcaccagccatcactaacttcttggtcaacgcagtattgattgccataggttataaatttttgagtaagagaagtatgtacttaactattcttgtaacaattcttatttcaatatttttgagtttaacagaatcatggcaagtagaaactggaaacagcattgtgaatgccatttttggtggtgtaagcgttggactaggaatcggagtaattatccttgcaggcggtacaacagcaggtacaacaattttggcgagaattgcaacgaaatacctcgatgtaagcacgccatatgctttgcttttcttcgatatgatcgttgttgcaatttcacttacagttattccacttgataaagtattagtaacagtaatatcactttatataggaacaaaagtgatggaatatgtcatagaaggtttaaacactaaaaaagctatgacgattatctcaactaatcccgaaaaacttgccaaagcaatagatgagcaaattggaagaggtttaaccattttaaacggacatggctattatacgcgtgaagaaaaagatgtcttatacgttgttatttctaaaacacaagtttcaaaagcaaagcgattaattaaacaaatcgataaagatgcattcctcgtaattcatgatgtaagagatgtttatggtaatggctttcttgcagatgaataattaaatggcatgagcacacatacttaaatagaagtccacggacaagtttttgaattatgaagacttatctgtgggcgttttttattttataaaagtaatatacaagacatgacaaatcgaactatccaatttaaaaagtaatgttagtcaataagattgaaaaatgttataatgatgttcatgataatcattatcaattgggatgcctttgaaaattgataatttaaaaatagaaattattttttataaacagaaagaattttattgaaagtagggaaattatgaatcgtttgcatggacaacaagttaaaattggttacggggataacacgattataaataaattagatgttgaaataccagatggcaaagtgacgtcaatcattggtcctaacggctgcgggaaatctactttgctaaaggcattgtcacgtttattggcagttaaagaaggcgaagtatttttagatggtgaaaatattcatacacaatctacgaaagagattgcaaaaaaaatagctattttacctcaatcacctgaagtagcagatggcttaactgttggagaattagtttcatatggtcgttttccacatcaaaaaggatttggtagattaactgctgaggataagaaagaaattgattgggcaatggaagttacaggaactgatacattccgacaccgttcaatcaatgatttaagtggtggtcaaagacaacgtgtttggattgcaatggcattagcacaaagaactgatattatctttttagacgaaccaaccacatatttagatatctgtcatcaattagaaatactagaattagttcagaagctaaatcaggaacaaggttgtacaattgtcatggttcttcatgatatcaaccaagcgattcgtttctcagatcatcttattgcgatgaaagaaggcgatatcatcgctacaggttcaacagaagacgtattaacacaggaaattttagaaaaagtttttaatattgatgttgttttaagtaaagatcctaaaactggaaaacctttactggtaacttatgacttatgtcgcagagcttattcttaattaagtaagttaatatgataaaaaggacaattaacatgacaaatagagagaatccaacgccattgaagtttttatcctatattataggtttaagtatgatactactaatcacactatttatttctacattaataggtgacgccaaaattcaagcctctacaattatagaggctatttttaattataatcctagcaatcaacagcaaaacatcatcaatgagattaggattcccagaaatatagcagcagtaattgtgggtatggcgcttgcagtttctggtgcgattatacaaggtgttactcgtaatggtcttgctgatccggcgctcataggtttaaattcaggtgcttcatttgctttagcattaacatatgcagttttaccaaacacttcatttttaatattgatgtttgctggatttttaggtgctattctaggaggtgctattgtattaatgataggccgatctagacgtgatggatttaatccgatgcgtattattttagcgggtgcagcagtaagtgctatgttaacagcgctaagtcaaggtattgcattagcttttagactaaatcaaacagtaacattttggactgctggaggcgtttcaggcacaacgtggtcacaccttaagtgggcaattccattaattggtattgcgttattcattatattaacaattagtaaacaacttaccattttaaatcttggtgaatcattagctaaaggtttaggtcaaaatgtaacaatgatcagaggcatatgtttaattattgctatgattctagcaggtatagcagttgctatcgctggacaagttgcatttgtaggtttgatggtacctcatatagcaagatttttaattggaactgattatgctaaaattctaccattaacagccttgttaggtgggttactcgtgcttgttgccgatatgatagcacgatatttaggagaagcgcctgttggtgcaatcatttcatttatcggtgttccttactttttatatttagttaaaaaaggaggacgctcaatatgattagttcaaataataaacgcagacaatggatagcactggctgtttttagcattctactatttctaggttgtacttggagtattacttcaggtgaatacaacatacctgtagaaagatttttcaaaactttaattggacaaggtgatgccattgatgaattaatcttattagatttcagattacctcggatgatgattactattttggcaggtgcagcgcttagtattagtggtgcaatagtgcaaagtgtcacgaaaaatccaatagctgaaccaggtatattaggtattaacgcaggtggcggatttgcaatcgcattatttattgcaattggtaaaattaatgctgacaactttgtttatgtactgccgttaataagtatactaggtggtatcaccgctgcattgattatttttattttcagttttaataaaaatgaaggtgttacacctgcgagtatggtattaataggtgtaggtttacaaacagcattatatggtggctcaattacaattatgtcaaaatttgatgataagcaatctgatttcatcgctgcttggtttgcaggtaatatttggggtgacgaatggccatttgtcattgcatttttaccgtgggtgttgattattattccttacttactatttaaatcgaatacactaaatattattcatacgggtgataatattgcacgaggtctaggtgtaaggttaagcagagaacgtttaatattattctttatcgcagtgatgttatcatctgctgctgtagcagtagcaggttcaatttcgtttatcggattaatgggcccgcatattgccaaacgtatcgttggaccacgtcaccagttgtttttaccaattgccattttagtaggggcatgtttacttgttatagctgatacaattggcaaaattatattacaaccaggtggggttccagcaggtatagtcgtagcaattattggcgcaccgtatttcttatatttaatgtacaaaacgaaaaacgtatagtgtcaaaggacacaacttattgctatgaaaagcactttattataaggcttttcatagcattttttatttaatgagtcactcaagactatttacattttcaataatgaaccattaagttatcaagacggtcttatcataaatatatttgataacggtatcaggttaaccctttatgatagcgcattcatttattctgttttatactatgactgataataccaaggaggtacaacatgatgaaaaagttaatcaataaaaaagaaacatttttaactgatatgatagagggcatgttaattgcgcacccagagctagaagcggtttccaatactgttatagtaaaaaaagctaaaaaagaacaaggtgtagcaatagtctctggaggtggaagcggacatgaacctgcgcatgctggatttgtagctgaaggtatgctagatgcagcggtttgtggcgaagtatttacatcacctacaccagataaaatattagaagctattaaagcagtagatactggtgatggtgtattactagttgtgaaaaactatgcaggtgacgtgatgaattttgaaatggcacaagagcttgcagaaatggaaggtataaatgttgaaacagttattgttcgtgacgacattgctgtgacaaatgaagcacaacgtcgtggtgttgcaggaacagtgtttgttcataagcttgccggttatcttgctgaaaaaggtcactcattaacagagattaaatcgcgtgtagaagcgttgttacctgaaattaaaagtattggtatggcaattgagccaccgcttgttccaactactggaaaatatggctttgatattgaagacgacaaaatggaaatcggtattggtatacatggtgaaaaaggtattcatagagaagaagtaaaggatattgttcatattgttggaacattattagacgaattgtataaagaagttactgccaatgaagtcatagtaatggtaaatggtatgggtggtacgccgttatctgaattaaatatcgtaactaaatatattcaacaaaatttggctgcaagaacggttaatgttgctaaatggtttgttggtgattatatgacatctttagacatgcaaggtttttctataactatcgtgcctaataaaccagaatatctggaagcatttttagcaccaacaacaagtcaatactttaaataagcagtgaatatgaataaatatacatttatgaggtggcacaaatgaaagtgaatgatatgaaagtgcgtttattaaatttagaagaaacttttaaaaaacatgaatctgaattaactgaattagatcgagcaattggtgatggtgaccacggggttaacatggttcgtgggtttagtagtcttaaagacaaacttgatgatagctcaatgcaatcattgtttaaatctactggtatggcattgatgtcaaatgttggcggtgcatcaggaccactgtatggctttagctttgttaaaatgtctgcagttactaaagatgatatggataatcaagatttcattaaactaattcaagcatttgccgaagcggttgaatcacgtgggaaagttactttaaatgaaaagacaatgtatgatgtagtagcacgagcagcagagaagcttaaaaatggtgaaactttaacattcaatgatttacagcaattagcagataatacaaaagatatggtagcaacgaaaggtagagctgcatattttggagaagaatcaaaaggttatatagatccaggtgctcaaagcatggtttatattttaaacgctttgattggagatgaagataatgcctaaaattatacttgttagccacagtaaagaaattgcaaatggtacaaaatctttgttaaagcaaatggctggtgacgttgatattataccaatcgggggattaccagatggttcaattggaacttcatttgatatcatccaagaagctttgactaaattagatgatgatgcattgtgtttttacgatattggatcttcagaaatgaatgtagatatggcaattgaaatgtatgaaggtaatcatcgtgtgttaaaagttgatgcaccaattgttgaaggtagttttatcgcagcagtaaagctgtcaattggcggttcaattgatgatgcattagcagaaatcaaacaatcattttagttaaaatttactaataatgaaaaatgtaaacctttttcaaatgaaactttataaaaaatatgatagtatatatgtaaatgtttaataaaatctggagaaataggaggacattgccatgcaacaccttataaaaaaacatgtattgaatggcgagtttgatttagtacgacaattgatgtccgaaacagattttatggaatttgaagaagcatatatttcaagtgcgcatgaagtagaaagtatgatgttttatacatgtattttagatatgattaagtacgaagaatcatctgagatgcatgacttagcatttttattgcttgtgtatccactaagtgaatatgaaggtgctttggattctgcttattatcatgcagacgcttccataaaacttactgacggcaaagaagttaaaagtttgttacaaatgttattattgcatgcgataccaacacctgttatttcagataagaaggcttttgatatcgccaagcaaattttaaaattagatcctaataataatgttgctcgtaacgtcttaaaagacactgccaaacgtatggacaacgttgttgttgatataaatgaattacatcaacgtaatgcacgttaattatatttcaattatattagcttaataatagttttaacatttggttgggttgggacacaggttccagccttttttaatacttaaaaactaacgaagtatatttgtgtgcacaaatggtttttatacaacattttataaatttatacattttaataaagaacatacgatagatagtttaaaccttgttaactgagaaattttgatatgtattttcgaaacttaattaaatatacgaaattcaagaagcataataattaatcatttttcctatataaaagttcgtatgactgcattataaaagcataaatttataatttttttaaatgtcattgaacgtgataatgtgaatagattgagcaattttgaaaaagtgaaaaataacctatgcgacttgcaattaattttcagtacgttataatgcacactgtgcaaaattaaggaggtctattattcacatgatgatgaataaagaagcaacaaaaattggatttgcctacgtcggcattgtagtgggcgcaggattttcaacaggacaagaagttatgcaatttttcactaaatatggcttgtgggcttatttaggtgtgattatatctggttttattttagcttttattgggcgccaagtagcaaaaattggtactgcctttgaagcgacaaaccatgaatcaacattacaatacgtattcggtgaaaagtttagtaaagtctttgattatattttaatcttcttcttatttggtatagctgtaaccatgatagctggtgcaggcgcaacatttgaagaaagttataacatacctacatggctaggtgcattaattatgacattagcaatttatgtaacattgctattagactttaataaaatagtacgtgcccttggtgtcgttacaccatttttaattgttttagttgtattaatcgctggcgtttatttatttaaaggtcatgtttcattagcagaagttaaccaagtagtgcctgaagcaagtatctggaagggaatctggtttggtacaatatatggtggattagctttttctgtaggttttagtaccatcgtagcaatcggtggggatactgaaaaacgtacagtgtcaggtgcaggcgcgatgtatggtggtattatctatactgtattactagcattgatcaactttgctttacaaagtgaatatcctacaattaaaaatgcatcaattccaacattaacattagccaataatattcatccgttaatagcaaccgtgttatctgttattatgcttgcggttatgtataatactattctaggactaatgtattcatttgcagcacgttttacagaaccatatagtaaaaattatcatatctttattattataatgatggtagcaggttatttattaagtttcgtaggatttgctgaattaattaataagttatatacaattatgggatatgtaggtctatttattgtagtagctgtaattattaaatatttcaaacgtaaaaatgcggataaaaaacatattgcttaatatcatatgatggatatccgaaactttacaattgaatcactttgttttaatcttaaaagcaattcgtctctactcttatcgggcgaattgctttttatatttattcagtctattaatatgagcgtctaacaaatagagaggtacgatgtaatgaataaagataataaatggacgatgataactgcgctttttatagctgtaatcagtgtattgttagcatttcatctgaaacaacattatgaccaaactacaaatgagaaccatgctaataaggacaaaattaatattaaaaataaaaatgtgcgcatttatcaaaaccttacatacaatagagttttccctaacagtaaattagatattattacacctgttgatatgtcttctaatgccaaactgccagttattttttggatgcacggtggtggttatattgcgggtgataagcagtataaaaacccattattagcgaaaattgctgaacaagggtacattgttgtgaatgtaaattatgcattggcgccacaatataaatatcccacaccattaattcaaatgaatcaagcaactcaattcattaaagaaaataaaatgaatttacctattgattttaatcaagtagttattggcggtgattctgcaggtgctcaattagcaagtcaatttactgcaatacagacaaacaatcaattaagaaatgccatgaaatttgatcagtcattcaaaccatcgcaaattaaaggtgctatactgtttggtggtttttataatatgcaaacagttagagaaacggagtttccgcgaatacaattatttatgaaaagttatacaggtgaagaagattgggaaaagagttttaaaaatatttcacaaatgtcgacagtaaaacaatcgacaaaaaattatccaccaacatttttatctgttggggatagtgatccattcgaaagtcaaaatatagaattcagtaagaaattacaagaattgaaagtaccagtagatacattgttttacgatggtacacatcatttacatcatcagtatcaatttcaccttaataaacctgaatcggtagataatatcaaaaaagtgttacttttcttaagtcgtaatacatcttctagtggtattcaaactgaagagaaaccacaaatagaaaatccgagtaatgaattaccgttaaatccattaaactaatgataaacagtagtaatttattattaaaactacatttaaggatctacaaattgaaaacgaagaatttattacatgaagggataatgtgtaagagtctgagatattataaattgttagcggttctttatcatttctgctccactctataatgatgtgatattgattttgcttaccaatttgttttggaactgaaaataactttttacaactaaatagtcgaaaaacagtgtgtacatgatataataaatttataaattgtaaagaatttaaaagaaaaattaaaatatagattgagcacgaagtgatttgaaataaggttgtgaaagggaatgacaaggtcagcattaaaaccatttaaaaataaacgcgttatggttactggacgtatacaacgtgttttgtttaaaaattatttagatagacatagcacatttaagccgaatgtaaggatattattaaaagatgtatttgtttcaggtgtatcaatagatcatttatggttatatgagacaaataaatactatgcattggcaatggaacttattcatcaacgagtaaaatttagtgcgaatgttgtaccgtattacaaaataaatagaaataataatttattcgtacaagattatggaattaagcgtaaaggtaggttaattactgaagaagcttacaatcagaacaatcagtatcaggataagatatatgaaaaaataccggatatagattttagactcgaagatttttatagtaaggaaaactaaataatatataaagcaccactaatcgtagttgatagttaatcaattacacattagtggtgttttattttgaatttaaatttgataaatgaataagagtgtacgtatttatttgagattagataatattgataagtgcgagcaatgtatcaaggtaaccattaaattcgttgttatacgattctaatacaagattatgataaaatagctttaattaagaattttagccatcatatagtcatcataatatttaccatcgataaataacttatcttttaaaacgccttcgatttgaaaatcggcacttttaaaaagctcgagggcaggttggttattgagtggtacatttgcttcaattcggtgtatttgattgtttaaacaccaagccataatggcatcaagaagtgcttggccaattccacgatgttgatataatttctttacacctaaatcaattttagcaacatgtttaatgcgttgaaatggtgtcgtattaacaaaggcaaagccaacgagttgttcatcactttcagcaacaaagatgactttatgtggagaagtgatatattcttctaattgtttactagccgatgtgacgctaggatcatattctcctggtgtatagaacatatacggagattcgtcgtatattttcgctaacattgaaatgaaattttctacatctttgatactaactctacgtataatatgggccataaaaagcctccagtattttgaaattttaaaacatttgctactattataatatatatgtaactaaaaggtggagtaatatgttttttggttacagtttaaaggagtattttagatgaaacctaaagttttattagcaggtggaacagggtatattggtaagtatttaagtgaagtgattgaaaatgatgctgaactttttgctatatcaaaatatccagacaataaaaaaacagatgatgttgaaatgacttggattcagtgtgatatatttcattacgaacaggttgttgccgcaatgaatcaaatagatattgctgtattctttatcgatccaacaaagaattctgccaaaataacacaatcatcagcaagagatttaacattaatcgcagcagataattttggtcgagcagcggctatcaatcaagtaaaaaaagtaatctacatacctgggagtcgttatgataatgaaacaattgaacgcctaggtgcatatggtacaactgtagaaacaacaaatttagtttttaaacgttctttagttaatgtagaattacaagtttcaaagtatgatgatgttagatcaacgatgaaggtagttttaccaaaggggtggacattaaagaacgttgtaaaccattttattgcatggatgggttacactaaaggaacctttgtaaaaacagaaaaatcacatgatcaatttaagatatatattaagaataaggtgcgaccgctcgcagtatttaaaatagtagaaacagctgatggaataataactttaattttattgagtggaagtttagtgaaaaaatatacagttaatcaagggaagttagaatttagattaatcaaagagtcggcagtcgtttatatacatctatacgattatatccctcgattattttggccgatttattactttatacaagcaccaatgcaaaaaatgatgattcatggctttgaagttgactgccggattaaagattttcaaagtcgattaaaatcaggagaaaatatgaaatatactaaatgatattgggtgatatggatgcaaatactactagtagaagatgacaatactttgtttcaagaattgaaaaaagaattagaacaatgggattttaatgttgctggtattgaagatttcggcaaagtaatggatacatttgaaagttttaatcctgaaattgttatattggatgttcaattacctaaatatgatgggttttattggtgcagaaaaatgagagaagtttccaacgtaccaatattatttttatcatctcgtgataatccaatggatcaagtgatgagtatggaacttggcgcagatgattatatgcaaaagcctttttatacaaatgtattaattgctaaattacaagcgatttatcgacgagtgtatgaatttactgctgaagaaaaacgtacattgacttggcaagatgctgtcgttgatctatcaaaagatagtatacaaaaaggtgaacagacgatttttctatccaaaacagaaatgattatattagaaattcttattactaaaaaaaatcaaatcgtttcgagagatacaattattactgcgctatgggatgatgaagcatttgtcagtgataacacattaacagttaatgtgaaccgattacgtaagaaactatctgaaatagggatggacagcgcaattgaaacaaaagtaggaaaaggatatatggcacatgaataatttgaaatgggtagtttattttctgaaatcaagaaagaattggatattttggatactgtttttaaatattcttatgttaggcattagtcttattgactatgactttccaatcgatagtttgttttatattgtttctttaaatttaagcttaacactgatttttcttatattaactttttttaaagaagtaaaattatatagacattttgaaaaagataaagaaatcgaagaaattaaacataaagatttagcggaaacgccatttcaacgtcatacagttgattatttatatcgtcaaattttagcgcataaagataaagtggtcgaccaacagttgcaattaaaaatgcatgaacaaaccatcacagaatttgtacacgacatcaaaacaccagtgactgctatgaaattgttaattgaccaagaagagaatcaagaaagaaaacaagcgctattatttgaatggtcacgtattaactcgatgttagatacgcaattgtatattacgagattagagtcgcaacgtaaagatatgttttttgattatgtctcgttgaagcgcatggttattgatgaaattcaattaacaaggcatataagtcaagttaaaggtatcggatttgatattgattttaaagtggataatcatgtgtacacggatataaaatggtgtcgtatgattattagacagattttatcaaatgctttgaaatacagtgagaattataatgttgatatttcaacggaattaatagatcaacatgttgcgttaatcatcaaggatcgcggaagaggaattagtaaaaaagatatgcctcgaatatttgaacgtgggtttacgtcaacggctaacagaaatgaaacgacatcctccggcatgggtctatacttagtggatagtgtgaaagatcaattaggaatacaattacaagtcacttcgactattggaaaaggaacaacggttaaattgatcttcccattacaaaatgaaattgttgagcgcatgtcagaagtgacaaatctgtcattttaaacatgcgttttgttacttagaattgatacatcatgaccacttcaacgatataatcaaatagatgttaattaaatacaaaattgaaggtaagcgtgccaaattgaatataaaggaaatgaagttaagataaatataggagtgttaaagtgacaatattagaagtaaaacaattaacaaaaatatatggtaataagaaaatggcacaagaagttctgcgagatatcaatatgtctgttgaagaaggtgaatttattgctattatgggaccttcaggatctggtaaaacgaccttattaaatgttttgagttcaattgattatatttcgcaaggttctatcacactaaaaggacacaaacttgaaaagctttcaaataaagcattatctgatattcgaaagcatgatattggttttatttttcaagagtataatttactgcatacattaactgttaaagaaaatatcatgttaccattaacggttcagaaattagataaggacacaatgttagatcgttatgaaaaagtggcagaagcattaaatatattagacatcagtgataaatatccatccgaattgtctggtggtcaaagacaacgaacatcagctgccagagcatttataacattgccttctattatatttgccgatgaacctacaggtgcactcgattcgaaaagtacacaagatttattaaagcgattaatgaaaatgaatgaagagattaagacgacaattattatggtgacacatgatccggttgcagctagctatgcaaatcgagtagtgatgcttaaagatgggcaaatattcacggagttatatcaaggtgatgatgacaaacatactttctttaaagaaatcatacgtgtacaaagtgttttaggtggcattaattatgagttttaatgagattatatttaaaaatttccgccaaaatttatcacattatgccatttatcttttttcgctaattacaagtgtagttttgttttttagcttcgtagcactaaaatatactcatagcattaacataactgagacatatcccataattaaagaaggatcgcaagtaggtagttactttctattttttatcattattgcctttttgctatatgccaatgtactatttcttaaacgtcgtagttctgaacttgcattatatcaaacattaggtttatccaaattcaacattatatatatattgatgtttgaacaattattaatattttcaataacagctatattgggtattacaattggtatctttggttctaaaattttattaatgatagtgtttactttattaggtatcaaagaaaaggttccaattattttcagctttagagcagtgtttgagacactattattaattggcgttgcttatttcctaactgcagctcaaaatcttatcttagtattgaaacaatctatttcagaactatcaaagcataatcagcctaagcaaatgaatcataataaaattacatttgaagaagttatacttggaattctaggtattattttaatcatcagtgggtattactactctttacgcattgtacattactatgatgcaattggcgtccttatgtttatattgtttgcgacagtaattggggcgtatttattttttaaaagttcagtatccctggtatttaaaattattaaaaggtttaaaaaaggtgtaataagtgtaaatgatgtcatgttttcttcatctattatgtatcgaattcagaaaaatgcattttcacttactgttatggcaattatttcagctattactttatcagtactttgttttgctgctatcagtagagcaactttatcaagtgaaattaagtacacgtcacctcatgatgttacgattaaagatcaacagaaggcgaatcagttagcaagtgaattgaacaaccaaaaaattcctcatttttataattataaagaagtgattcatacaaaactttataaggatgacttatttgatataaaagcaaaagaaccatataacgtaacaattactagtgacaaatatattcctaatacggatttgaaacgtggtcaggctgatttatttgtggcggaaggcgctattaaagatttagtgaagcataagaaacatggtaaggcagtgataggaacgaaaaaacaccatgtggatattaaattacgtaaagatatcaataaaatttactttatgactgatgttgacttaggtggaccgacgtttgtgttaaacgatcaagattatcaagagataagaaagtatactaagccaaaacacattgtttctcaatttggatttgatttaaaacataaaaaagatatgttagcattggaaaaagcaacaaataaagttgacaaatctattgaaacaagaagtgaagccataagttcgatatcgagtttaacgggaatattgttatttgtcacctcatttttaggaattagtttcctaattgccgtatgttgtatcatatacattaaacaaatagatgaaactgaagacgagttagaaaattatagtattcttagaaaacttggatttacacaaaaagatatggcaaaaggattaaaatttaaaattgcgtttaattttgggttaccattagtcattgcactttcacatgcatactttacatcgttagcatatatgaaattgatggggacaacgaatcaaataccgatatttatagtaatgggactatatatttgtatgtatgccatttttgcaataacagcttataatcattctaagcgtacaatcagacattcaatttaatatatatatagcggctttcagtaggctagtggattaagattcatgagctttactgaaagcttttatttttggatagttatagatccgggcacgatagttttaatgtatatgcttcaactttgtaaattgtattaaatgtgagaaaatagaggcataggcattgaaagaaatatgaattaagaatagttagaagaaagataagtgtattttaatatgtaaaagttatgtaataaatattgtatcgttgcaaattttccgactatgtccatttacaattattagagttttgcagataaaaatttgcctatatatcaagtttttcaaaacaaatgcctaccactatttaaattttatgtaaaagttaagtttcggaattgttaaaaatttgtaaattgaattgtgggattgtaaattttgtgctattttcatataagggcaaatacagtaaattgtttactgtgaggcatttttgaaattaatatcagtacactaaaaatatactgacgattgataataacaaatttgtatcattagtttgtaaattcacttgtcttaatttgaaacaaattataactgaatgtgattggtgacaatcgcttaaatggaggattttaaatgtttagtaagaaaaaagataagtttatggttcaattagaagagatggtttttaacctagatcgtgcagctattgaattcggtaaaatggatttcaatacacatctagatttaaaggcatactcagacaacattaaaacttatgagtcacatggtgacgaattagtacatcaagtaattactgatttaaatcaaacatttatcacaccaattgaacgtgaagatattttatcattatgtgatgcaattgatgatgttttagatgcaattgaagaaacggcagctatgtttgaaatgtattcaatcgaatacacagatgaatatatggctgagtttgttgataacattcaaaaagcagttgcagaaatgaaacttgctgtcggcttattagtcgataaaaaattatcacatatgcgtattcattcaattaatattaaagaatttgaaacaaactgtgatggtattttaagacagtcaattaaacatattttcaatagcgaaacagatccaatcacattaattaaaataaaagatatttatgaaagcatggaagaaattgctgataaatgtcaaatcgtagcaaataattttgaaactattattatgaaaaatagctaaggggagtatatatttatgtcatatataatcatcgtcactatagctgtagttattttctcgctgatatttgactttatcaatggattccatgatacagccaatgcagtagctactgctgtatctactagagcgttaacgcctaaaacggcaattttaatggcagcagtgatgaactttataggtgctttaacatttacgggcgttgcaggcaccattactaaagacattgtcgatccatttaaattggaaaatggattagttgttgtgttagctgcaatacttgcggctattatttggaatttagctacttggttttacggaattccaagttcgtcttcacatgcacttataggttcaattgcgggtgcagcaatcgcatctgaaggctcatttggcgtattacattaccaaggtttcacaaaaattattattgtattaatcgtttcaccgattatcgcattttgtgttggtttcttgatgtattcaatttttaaagttatctttaaaaatgcaaatttaacaagagcgaatcgtaactttagatttttccaaattttcacagcagcgttacaatcattctctcacggtacgaatgatgcgcaaaaatcaatgggtattattacgttggcattgattgttgctaatgtacagaatgatggcagcgttgaaccacagttatgggtaaaatttgcctgtgcgacagcaatggggcttggtactgcaattggtggctggaaaattatcaaaactgtaggtggtaatattatgaaaatacgtcctgcaaatggtgctgcggccgatttatcatctgcattaacaatttttgttgcatcatcgttacatttcccattatcaacaactcacgtggtgtcatcatcaatcttaggtgttggtgcttctaaccgagctaaaggtgtaaaatggagtactgcgcaacgaatgatcattacatgggtgattacattacctatttcagcattgttagcaggtttattattctatatacttaacttatttttctaattgaaaattaagctatactgaacttcagtatcacaaatatatggtggtattgaagttcattttttatgtaaatagataacatattttatagaatttacatagaatgaccaagacaaagcattttaattaggggctaagttataaatgtattccatggaacataatcatttagttcattaaaatataagtaagcgtaaaataatgatttagtttatattcttcaatgaatgaataattaaatagctatcaacttgtttaattaacctaaattgtattggactttatttaatgtaaatttgtatatgtagacgaaaaagcgtaaaatactggtataacaaattaaatcattatatagtcaacttagttgcattattttgatttttaatatattatgcatttaatttaatcaaataggtaggtcataatttttacctaactaccattcatacaaaatataaataagtatgatagggaagggtgagataatttttgtgccaaaatgaaaatttttttcaaaaataaaaaaactagcaatctcacatgatgtgaattgctagtatatatcagtacaatttatttaattaatggatgaatgcatagctagaaacttctgaagctggaattgtacggtagttcatattatatggaccatatgtgtaattcatttcagaaatcaagatactaccatcaccattgacacgttcaacataagcaacatgaccatatggaccaggtgtgctttgcataattgaaccaactgatggtgtgttgtttacttggtaaccatcattagctgcgttaccagcccaatacttagcgtctgaccaatatgtgctaattggactaccagcttgagcacgacggtcaaatacgtaccatgtacattgaccagcagtgtataaattttggtgattaaaagatgatgcattgccattgctacctgttgtagctgttggtgttgtaccacctgatccaccattaggaatttgtaatgtttggttaggcataattaaataaccacgtaagttattggctgccattaattgatcaactgaaacaccatatctgctagcaatgatatttaatgattcaccagcttgtacagtatgagatgatgctgagccagcttgtggagaagtgtttgatgtattttgtgcatcacttccacctactgagataacttgaccagggaataccaagttgttatctaattggttattttgtttaatactctctactgaagtgttgtatttttgagcaatactccataatgattcaccagattgtactgtatgttgtgtagatgcttgtgcatcatgatgcgttagaaatgcagctgcaccagatgttgctgttattgcaaatgctaattttttcaaagggactcctccttaaaattaagatttactacttttaaaaattattaagacaatttatatagtaaattaagttttcgttttatattacgctttccatattatcaaaaataagtagctttgtgtggtttgttattatcttgtaatattattaacattttaggatatcggttcatatttttataaatgctgatttgatagtgtataaaagcgttttagtgattttaactaattataaaaaattatattttgtaacattgtaaaatgtaaaattactatacttgttaaaggttatttcttttgatgaaacaaaatttactgtaaaatttgacgcataaaacgacagtagaaggaggaattattttgtcgcaaaatacaaatcattcatattatcatcaaaatcagcatgctcaatcaataagtaaagtgtggctttattttatgtattattggattatatttggcataggatgctatctaggtcagtttttaccattaagttggcgacaacccttgtcatttggattactgattattattttagcaacacttgtttttgaaagagcaagaaggttcggtttaattatttcacatatttacgccgtagtgattggcttattgtcatacgcaacgtttaccacgtatttacaaaatttaggaccagatattttctataaaaatatcgcattagcaatttttgcatttatagcatttggcattattggttatttcttcgttggagatgcatcgagtataggcaagtatttattcgttacattaataacattaattattgcgagtctaattggtatttttcttcaaaatcctattttttacactattattaccgtcgttagtctgttgttatttctactttatactttgtatgattttaatcgtttaaaaagaggtgactattcaccaagagaaatgggatttaatctatttattaatttgttgaatattattaaggatatactttatcttgctaatatgttcagaagataaacagttaaattaataaagaaatttgtataaagttttggaataatcaataatgaatatcaaccttaaactggagcgattgtcataagttagaaacttagactgagattttactgataaagcaataaaaatatattaccttaattgtaaagatattattaatcattgaaatgattaactgctatagttctaaagtaaacaaatcttagaagataaactttaaacaggtgtacttgcctttctaattacacttttattagaaaagtaaagtatagctacgtattaattttaaaatcgaaatattaataggaataagtatagataatataaacaatttaatgttagtttgagctcatctcaaaagtagaatgtgatttaaataagtgtttatttttaaattgaaaatgaatgtaaagctaacaaaagataatagtaatacgttgtagatgtggtcatttaaaattattttgaaaatgctaaaaagtagtgcattttcaattggatagtttaattaaactgactacatctatttttgtaatatttaaatgattgatatatataagtttaaaaattacccattatatagttttatttatttttgatttggtattcgtattgtgttaaatttacgtttaattaaataagttaaatattatagggaatgataaaagtggtacttaaatatagaaagaggtaaagttatggcaaaatcatgcttgcatatacttactaataatgaatatgcgacaacgcgttgccaagatggcatagtcttattttggccaattgacggggaaatcgaactacaaaaatttcgtaaaagtaaaataattgaagatgatatatatatcattaatcatctggatgtatttagtattaagaataataaaaaaacgatcatgttgtatttgagtagcgattggtttgcggaattaggctttactttctttaattatcactatacagcaaagttaattaaatcatcctataatttgaaatgtttactattaaaattgacttatcgataccttgataatcagcctcttaatgacgctgatattagaaaattacaggatattattaaaatcattgcaaaagaagcaagtatggataaaaagattgcgcaaaatcaatatcgttatgcttattatggtgatttgcgagatgagctcgaatatatttatcaaaatgtaaatcagcgattgacattaaaaagtgtcgctgataaattatttgtttcaaagtcaaatctgtcttcgcaattccacttacttatgggcatgggttttaaaaaatatattgatactttgaaaattggtaaatccatagagattctacttactacagatagtactattagcaatataagtgaacatttaggatttagcagcagctcaacgtactctaaaatgtttaaaagttatatggatataacaccgaatgaatatcgtaatttatcaaaatttaataaatctataatgcttaatccagagccacttgtaggcggtatggctcaagaagtaaaagacgtcatattgaattatattgatcattataaaaatcacctaactgatgttatacatattgacgaagacaaatttgaaatacctaagttatttcaaacggttattcaaattaatacttatacagaaatgaaactagttttcttagaaggactttttaaaaccttattgaataagaatagccaagttgtctttttcatcatgccatcaattttaaaaagtaaaaataccatgtccgaagaagaaaagtttacaatcattaaaaccataattgaaagtgatttaaagatagcatttaatataaatgatattgaaacgacttactatgttgaagaagcttttatgaatgttattagacaattatctccaaacgaaataaatcatcataataattacgaagtgcattttgtttttgatttatcattgatggaaattaggacaatttaccgtatgattttaaaactacataacatcatgttaaatgtgaaattaggattgaatattacctgtttatttgataaaccttcagtttttaaatcactagtatcacaaataaagcgacttaaattcgattcgttaataatagataatgcaaatttaagtagcccttatttgatgggggaaagtgatgagttactattgaaaaatattttgcattttaaaaatttaaaacaagttattaacgaattggatatagcacaagaaaagctgatttttctaaatgttgaaaatcataaactgcttaataataaagaacgagatttaagtaatagtgctccattaatttataagacattaagtgcgctgtatcataactttgatggttttggattaaacatttttgataatcatcaaacatttaatgcgatgcatctatatgataaaaatggatttaaaacaacactaggtcttatattagaaaagtttatcgaatatgtctcgaaaccaaaatacgaaaacagttattattctatttttgatatagagaattattattgtctggttatttatgattggcgagtgattgagagcgagacaattatgagcaattttgaagatagtcaagtttatattaatttcaaaaataatgttttaaacgataaatatctaattgtaatagaaacgttggatgaaaatagtgggaacattaatcatttgatctctaaagaattaagagataaatatgaatggaaccccagtttactctctaaaattgacaactaccttaaaccggcaatcgagattaaagagcataactttagtaataattccttaaatattaacgttacttttaatgcgttatacataattaaaataggaaaaaaataacaccttgatatgtattgcaaaatttaatttgcatttgttggtaattttgacaatgtattaaaaacaaatgagaaagacaatggcagaaaaatttaagataataatgacagaagcattgtctttatatatttgggggtgcaacattttgaatactgagaaattagaaacattgcttggcttctataaacaatataaagcattatctgaatatattgataaaaaatataagttgtcgctaaatgatttagcagtcttagatttaacgatgaagtattgcaaagatgaaaaagtacttatgcaatcatttttaaaaactgcaatggatgagctagatttaagtaggacaaaattattagtttctataagaagactaattgaaaaagaaagacttagtaaagttagatcatctaaagatgagcgtaaaatttatatttatttaaatgatgatgatatatctaaatttaatgctttatttgaagatgtagaacaatttttaaatatttaattgaaattgagtgtcgaaagcatagaaattgcttatcggcacatttttaatttatacatattttaaaactaagtgacagattgaagaaatcgtagttcaataatgttaattgtgaaaatgtatataatcataaaaaaatcatgtataatatatgttgttaattaaacagttcgaaagcgagatgacattatgggacgtaaatggaataacattaaagaaaaaaaggcccaaaaagataaaaatacaagtagaatatatgcgaaatttggtaaggagatttatgttgcagcaaaatctggtgaaccaaatccagaatctaaccaagctttaagattggtacttgaacgcgctaagacatattcagtaccgaatcatattattgaaaaagcaatagaaaaagctaagggtgctggagacgaaaactttgatcacctaagatatgaaggatttggcccaagcggatcaatgcttattgttgatgcgttaacaaacaatgtaaatcgtactgcatctgatgtgcgtgctgcttttggtaaaaacggcggtaatatgggtgtatctgggtcagttgcttatatgtttgaccatgtggcaacgtttggtattgaaggtaaatctgttgacgatatacttgaaacattaatggaacaagatgtagatgtaaatgatgtgtttgacgacaatggattgacaatagtctatgctgaaccagatcaatttgcggttgttcaagatgcgctacgtgcagctggtgtagaagaatttaaagtagcagaatttgaaatgttacctcaaacagatattgagctttctgaagcggaccaagtaacatttgaaaaattaatcgatgcattagaagatttagaagatgtacaaaacgtattccataatgtggatttgaaataatgaaatcagcagaacaatggattgatgaattgcaacttgaatcacatcctgaaggtggtttctatagagagacaatccgagaagtattgaaagatggacgcagagcgccgtttagtagtatttattttttgcttacagatgacaatatttcgcattttcatcgaattgatgctgatgaagtatggtactatcatgctggtgattctctaacaattcatatgataaatccggatggggaatatacgactgcaacattgggtactgatatccaaaatggagatgtattgcaatatgtagtgcctaaaggaacaatttttgcttcttcaatcgaaatttcaaatacttatagtttagtaggttgtatgtgtcaaccagcatttgagtttaagcagtttgaattgtttaagcaatctgaattaattacacaatatccgcatcttaaatcagtaatcgaaaaatatgctttaaaataaaaagaatcaatgaagtgatttgaaggttgttagtaaacctttgagtcacttcatttttgtatgtattctgattcaatcagaatagaattgatgctacagctttttctaatgaaattaacattaaatggttttgaaaatgataagactataatatttatatttttgaaaaatcactgttatgaagaaatatgtgcacgatctaattaatattgtctattttaagtaaattgaggcgagttgtagtaaaataataataaatattttcatatgattaacaaaaactataaaactgtatcatgacatgacatcatccatgtagttttatataataatgacaaggagttggtgactgtgaaagtaaagtatatagataaacgtcactggcgtcgcctaattgatagggaatacacagaggtaaaagttaataataataggttcaagggtattataggcttagtcacgatgaaaaaggttcgtgatcctttagaggtgacggtagttggacaaaatattattgtcgcagatgacaattataaatggttgcaaatactacctgaaaagaaacgttatagtattactgtaatgtttgataataaaggcaatccattagaatattactttgatataaatattaaaaatataacgcaaaaaggtaatgcgcgtacagtagatttatgtttagatgttttagcattacctagtggtgaatatgagttggtagatgaagatgatttaatgtttgcattagaaagtgagcaaattacaaaaaagcaatttcatgaagcatatatgattgcgcatcaaattatggcagagttagaaaatgattttaaaggattccaaaagaaaatcatgtactgctttaataaaattaatgcaaaggctcaaaaaattcatcaaaagccacaaaataaaactaattttgaaaaaagcaaacaaataaaacctaagcaatataatcaaactaaaaatcaccaacaacaaaagaaaaactaagtaattcaagctgcagccataccaataaaattggtgaaaattattcgttagtaatgaactcttgaatgctcgtagtcatgaaagttcaataattgaataatttatggggggaaattatgaagattgaagactatcgtttactaataacattagacgaaacgaaaacgttacgtaaagcggctgaaattttatatatatctcaacctgctgttacacaaagactaaaagctattgaaaatgcttttggagtagatatttttatcagaacaaaaaaacaattgattacaacaactgaaggaacaatgattattgagcatgcccgtgacatgttgaaaagagagcgattattttttgacaaaatgcaggcacatattggtgaagtgaatggaacaatatcaatagggtgttcttcattgattggacaaaccttacttcctgaagttttgagcctatataatgcccaatttcctaatgttgaaattcaagtacaagttggttcaactgaacaaattaaagcaaatcatagagattatcatgttatgataactcgtggaaataaggtaatgaatttagctaatacacatttatttaatgatgatcattattttattttcccgaaaaatagacgagatgatgttacaaagttaccatttatagagtttcaagctgatccgatttatataaatcaaataaaacaatggtataacgataatttagaacaagattaccatgcaactattacagtggatcaagtagcaacttgcaaagaaatgttgattagtggtgtaggtgttacaatcttgccagaaattatgatgaaaaatatcagcaaagaacaatttgagtttgaaaaagtagaaattgataatgaaccgctgattcgttcgacatttatgagttatgatccgagtatgttgcaattaccacaagttgattcgtttgtaaatcttatgacgagctttgttgaagaaccaaaggcgtagtcttagactaatttaaggttagtatttaattttaagatatacggttaaattgaacacagttggatgctaatgcaccaacacagaagctgacgaaaagtcagcttacaataatgtactggggtgggacgacaaaataaattttgcaaaaatatcatttctgtcccactcccataagagcccctaattaataaattaaaaggggacaaaggaatacagttgattgctaatgcaccaactgcataagagcccctaattaataaattaaaaggggacaaaggaatacagttgattgctaacgcaccaactgcataagagcccctaattaataaattaaaaggggacaaaggaatacagttgattgctaacgcaccaactgcataagagcccctaattaataaattaaaaggggacaaaggaatacagttgattgctaacgcaccaactgcataagagcccctaattaataaattaaaaggggctctaagaagcggggttatggatatgtttgcagcgttattacaaataaagaattataaactctttgttgctaatatgtttctactaggtatgggtattgcggttacggtcccatatcttgttctttttgcaactaaagatttgggtatgacaacaaatcagtatggattacttctagcatctgcagcgattagtcagtttacagtaaattcaattattgctagattttcggatacgcatcactttaatagaaaaattattattattctcgcattattaatgggtgcgcttggtttttcaatatacttttttgtagatacaatctggttattcatattactatatgcgattttccaaggattatttgcaccagcaatgccccaactttacgcatctgctagagaatctatcaatgtttcaagctctaaagatagagcccaatttgccaatacagtattacgttcaatgttctcattgggctttttatttggtccatttattggtgcgcaattaatcggattaaaaggctatgctggattgtttggtggaacaataagtatcattttatttactttagtacttcaagtgtttttctataaggatttaaacattaaacaccctattagtacgcaacaacatgttgaaaagattgctcctaatatgtttaaagacaaaacgcttttattaccatttattgcatttattttattacacattggacaatggatgtatacgatgaatatgcctttatttgttactgattatttaaaagaaaatgagcaacatgtcggttatttagctagtttatgtgctggtttagaagtgccatttatgatcattcttggcgttttatcatctagattacagactcgaacattgttgatttatggagcgatttttggaggtttattctacttcagcattggggtatttaaaaacttctatatgatgttagcaggacaggtgtttttagctattttcttagcggttcttttaggaattggtattagttatttccaagatatcttaccagatttcccaggatacgcctcaacactattttctaatgcaatggttattggacagttaggcggtaacttattaggtggtgctatgagtcactgggtaggtttggaaaatgtattttttgtatcatcagcatcaatcatgttaggtatgatacttattttctttactaaaaatcaaaaaattacaaaagaggatgtgatatcaacatgacaattattttatggctacttatcatcgctgccttcatgttagcatttgttgggttgattaagccgattattccttctgttttagtattatggattggctttctaatctatcaatttggctttcataatcagcatttatcatgggtgttttatgtatctatggcattgctaacaatattaattttatgtgcggactttttagctaataaatattttgtgaatcgcttcggtggttctaagtttggagagtatgcagctttaattggtgtcgttattggatgttttgttttaccgccatttggaattattatcattccttttattttggtattcatagttgaattaatacaaggctattcatttgaaagagcagttaaagtaagtataggttcaatcgtagcatttttaacaagtagtatagctcaagcaatcattatgtttataatgattgtatggttctttatagatgctttattgattaattaataaaaagcttattgcaaaatatgtttttaggtaactgtaatttagtgattttatcattaacagtaccaaattagcatatgatgtaataagctttttgtttataaaaatgtatgagaatgttttttcgaaatatttctttcaatgcgtaatccaataggcataactataaatgaaaatataataaatacccaattgcttacctgaatatatggtccaaaggcaagtaatgattgtggaataaagaatacatagaaaaatcctacaattagtagaatgattgctaaataggtgaatatccatatccaatttgaattgttaaaacactgcagttgaattgttttaaaactaaaccatataaataaaaagacaataaagaatccaacgactactgaaaacgggaatgaaacaaaatataaattacttccacttttttccatgaaaaatcctaaaaatcctttgagaaaactaacaataccaattaatagaacgatgtgctgatatatatatttaaaaatatttttaaatgtttcattaggcatcgcttttagttcttttattgcatgtgcttttgggtcgtgattgaaaaaatctaaggctaataaaccatgttgttctgcgcttaataattgtttaagtatacggttaataattaactctgtatcatgaggattgacgcgaaagtcagagcgcatataagtcatataattctcgaagatttctctatcagtattgcttaatcttaatgatttaacattattttcttttgttaattgcgcagtacttttcattgttactaaagcgctcctttaaaaatgtttaattccaaactaaaatggaaatgattttatagtattaataaggtcaatcatatcatattaaacgcataaatataacgattaatattggagaagaaaatgaggacacttaataaagatgaacataattatatcaagcaaatagctaatatacatgagacattattgtcgcaagcagaatccaactataaatgtactaaactgagtattgctcttaggtacgagatgatatgttcaagattagaacatacaaatgataaaatttatatatatgaaaatgaaggtcaattaatagcgtttatttggggacattttagtaatgaaaaaagtatggttaacattgaactgctatatgttgaaccacaatttcgcaaactgggaatagctacgcaactgaagattgcgcttgaaaaatgggcaaaaactatgaatgcaaagcgaataagcagtacaattcataaaagtaatttaccaatgatatctttgaataaagatttaggttatcaagtgagtcatgtgaaaatgtataaagatattgattagaattaggattatgttgctaattcatgttaaaattaaaaaagatttaatgacgttaaggagttttatatgaagaaattaatcatcagtattatgtcagttatgattttattagcaggttgcggtaaaagcgaagaaaaagcaactcttgaaaaagatatcgataagttagaaaaagaaaacaaagaattaaaagataaaaaagaaaagcttcaacaagaaaaagaaaaattagcagacaaacaaaaagatcttgaaaaagaagtgaaagatctaaagccgtctaaagatgataaaaaggacgaagacaaaaataaagacaaagataaagataaagaggcatcacaagataagcaatcaaaagatcaaactaagtcatcggataaagataatcacaaaaagcctacatcaacagataaagatcaaaaagctaatgacaaacaccaatcataattgaattgcttacttgttatagatggaaggtacagcgttttaaaccttattttaagggtatgtattaattaaaatgtggtcatgattgaaacagaacgtaaaaatagacaacgtaattaataaaggagagaaacggcatgcatgaacaagattttagaattttagagggtcaagatattactttgccagaattaggtaaagaattagaaaatattacgggacgtacgattactgattctactggcgaaattaagcgtgtaattgcacatttaccaaactttgagtccgatacagatacttttgttgctacatatcgtttaaaccatcaacaagattttatagatgcaacttttactgcgctgaaatcagatagaacacgtttaaaagaagtgccagttcatgttgaacttataagctatatttctaaatcaaaataaactgctatctaaaacgcaaagttgatcaaaatatcgattttgtgttttttattgagaaattatataggagtgtcaatcgatgatttattgtgaaacagagcgtttaatattaagagactggcatgaagatgatctgttaccttttcaaaaaatgaatgcgaattatgacgtacgtaaatattttccaagtttattgagttatcgtcgttcagaattagatatgagaactatggattcggtaattaaagattatggcattggattatttgctgtagaagataaagagtcccatcaatggataggatttataggtttgaattatattccagaaacaagcgattatccatttaaagaattaccgctttatgaaataggttggcgcttgttgccagaattttggggaaaaggattagcaactgaaggcgcaaaggcaacgttgaagttagcagaacaacatcaaatatacgatgtctatagttttacagccgaagcaaataaagcttcacaacgtgtaatggaaaaaattggcatgacagtgtatgatcatttcgaattacccaatctaagtaagtatcatttattaaaaaggcaagtgcgctattacattaatcttcgaaagtgaaaatttatacataagcgtaacaaacacccctaatattgtttagctgatgataacaatattaggggtgtttgtttattttttaaccttagaatgattaatcgtatgaacgagtacctagaggtttgaaattcaatattgattctattaatgattccttagtgtcgcataacggcgcaagtgcacgatacttaggatcaataaaaccttcctcaatcatatggtcaatcattgtttgtagtggattgaaaaagccattaatattataaatggcaataggcttttcatggatacctatttgagcccaactatacatttcgaaaaattcttctagtgaacctgcgccaccaggagccatgacaaatgcatctgcaagttctgccattttatttttacgttcatgcatagaatcaactaaaattaattcagttaaacgttggcttgtgatttcatgttcatctaacattttaggcatgacgccaatagctttgccaccatgatctaatacaccatcttgaatggcacccataataccaattgaccctgcaccaaatactaattcataaccttgttcagcaaaatatttacctaaatcgtatgctttttgtacatatgaagggtcatgacctttgcttgcaccacaataaactgcgattcgcttcatattaatccagctccttaattcgatgaatgactcttaatagtgattgttcaaacactttttgatcttgctttgtaaaaggtgggggacctttgtggcgaccaccttgttttctaatttgtgcattcatatatcgtttatctaatagttgttgaatatttttggaattgtatatcttcccattatgatgcatgacaattaagactttgtcgactaataaacttgcgagtccataatcttgagtgattacgatatcatctttcgttgataattgaacaattttgtaatcaactgcatctggtccatcatcaacatataatgttgatacatgtgggggatataattggttcgaaaaatggctgaagctccgaataattgtcacaaaaatgcctgtctcagttgttaaatctataatagaatcaacaacaggacaagcatctccatcaataataatatgtgtcacaattatgcctctgtattgttttctttattttgttgagaggcgcttttggcaacataatctttatattttttaaatgacttgatgcgtgctttatcagcttcttgttggcgtttttgttcttctttgtgtcgtttttcaatatttttttgtaactttttattcattttagcgatttctttgcgatttttttcagctagtttatcgccttttttctcagttttctcatctaatttattaggtgttaagcctgctttttcttcgtatttttgtgagtttttcatatctttaatacgttgtatttcattcttttcgcgggctttttgctcttctttatgacgcttttcgatatttttttgaagtattttattcattttatcagcgtctttacgattttgtttagctaatttttcgccttttttctcaatataggcaggatcatgttctctagcaaactttttaagttcacgcttattttcaaaatcttgctttttatcgccgacatattctttaacatcactcgctgtgttactgattgctgcagatgtttttgaagcaactttacttgtagcatctgtaactttttgtacgtccggatgttgtttgatacgtttacgttcaacaattaacggtaccaatacaattggtaatacattaatcataaatttgatgacttttttcttatccatagatcttgcctccataattactttattaattttacataccctatgatacatcaatataaacgatgagagtagtgaatcacttataagtatttcagatgtttttaaaagaagacaataaaaactgccaatcaagtggttccttaattgacagtctatattttaaaaggaaattaaatacctttaccaatcccaaatccgaagtaaagtatagcaataaagattactaatataattctgtaaatggcaaatggaattaatttgattttgttaattagatgcaagaatgttttgattgcaattagtccaacagtaaatgcagctaaaaagcctaaaatataaaaaggtatatcagcaatctgaatatcttgataatgttttaataaagataaaccacttgctgccaacataattggaacagccataataaatgtgaagtccgatgctgctttatgatttaatttcattaatacaccagttgaaattgttgagcctgaacggctgaaaccaggccacatagctactgcttgagagataccaattacaaacgcttggaaataattgatttgatccactgtttgtgggtttttaactttaactgaatatttatcagcgataatcatatagatagcacctacgaataagccaatcataacagttggcacactaaataaatgttcttcgatgaaatcatcaaatagtaagcctaaaatacctgctggcaccatacccactaatacatgtaataaatttaaacgtcttggctttgaacgtctttgttgattgttatctccttcaacatgtttgtgtttaccaatatgtaaaatctctaagaagcgttcgcggaacacccatgctgctgcaaagacggatcctaattggatgacgattttaaatgtaaatgctgattgagaacctaaaaattcagatgattttaaccacatatcatcaactagaatcatatgtccagtagaggaaacaggggcaaattccgttaatccttcgacgatccctaagataataccttttattaattcaatgataaacataatgtacccactttcattactcaatttaatttatttaaatatcaaaattaccatatcatgatagcatattcatttaaagacatgctagttatagttataatactagactaaagatgtatatattcattttcttttacatgtaaaactacaatattttattgagctatttaatttgattttaaggaaaaccttttataataagtttaggtgatataattgtgaaaaaattaacaacaatactgtttcaatataaaatttttccggtactcatgttcttggtcagtactggtctcggcatactcgttataacgcaaaatattttaatagcagattttttagctaaaattataagacatcaatttcaaggtttatggattgtattatttattttattaggtgttttacttttaagagcaactgtgcaatttctaaatcaatggttaggtgatacattagcatttaaagttaagcatatgcttagacagcgggttatttataaaaataatggtcatccaatcggtgaacaaatgactatactcacagaaaacattaatggtctagcacctttttataagagttatttgcctcaagtgttcaaatcaatgatggttccgctcatcataatcattgcaatgtttttcatccatatcaataccgcattaattatgttaataactgcaccatttattcctttgttttatattattttcggtttgaaaacgcgagatgagtcaaaagatcaaatgacttatttaaatcaatttagtcaacggtttttaaatattgctaaaggtttagtgacgttaaagctatttaatcgtacagagcaaacagagaagcatatttacgacgatagtactcagtttagaactttaacaatgcgcattttacgcagtgcttttttatcgggattaatgctcgaatttataagtatgttaggtattggattggttgcattggaagcaacgctaagcttagtagtatttcataatattgattttaaaactgcggcaattgcgattattttagcgcctgaattttataatgcaattaaggatttaggacaagcgttccatactggaaaacaaagtgaaggtgccagtgacgttgtgtttgagtttttagaacaaccgaacaataataatgaatttctattaaagtatgaggaaaatcaaaatccatttattcagttaacagacatatcatttcgatatgatgattctgatagattggtattaaatgatttaaatttggaaatatttaaaggtgatcaaattgcacttgtaggtccaagcggggcaggtaaatcaactttgacacatcttattgcaggtgtttatcagccaacaataggtactataagtacaaacaagcgtgatttaaatataggaatacttagtcaacagccatatattttcagtgcttctataaaagagaatattacgatgtttaaagatatagaaaataatactgttgaagaagtgctagacgaagtaggtttattagacaaagttcaatctttcacacaaggcattaatacaataataggtgaaggaggcgaaatgttatctggtggacagatgagacgcatagaactttgccgtcttttagttatgaagccagatctcgttatatttgatgagcctgcaactggtttagatattcaaacagaacacatgattcagaacgttctgtttcaacattttaaagatacaacgatgattgtcattgcacatagagataatacaattcgccatttacaacgacgtttgtatatagaaaatggaagactgattgctgatgatcgaaatatttcagtaaatataacagaaaatggtgatgacttatgaaaacacgactaaaatttcaagtagataaggatttattgttagctatagttgttggtgttagtggaagtttagttgcgctcgccatgtttttcttaagtggttatatggtgacacaaagtgcacttggtgcgccactatacgctctgatgattttagtcgttacagtaaaattgtttgggtttttaagagctattactcgatacgtagagcgccttatttctcataaagctacatttacaatgctacgtgatattcgggtacagtttttcggtaaattagtaaatgtcattcctaatgtttaccgtaaactgagttctagtgatttaatttcacgtatgattagtcgtgttgaggcattacaaaatatatatttacgtgtttattatccaccagtcgtcatcggtttgacagcgctagttacagtaatagtattggcgttcatttcaatcggccatgcgttattgattatggttagcatgttgtttactttactcattgttccttggttaagctcaaaaaaagcacgtactttaaagaaacatgcagctaatgaacaggctcgatttttaaatcatttttatgattataaagctggtatggatgaactacgtcgatttaatcaaattaatcattatcgagataatttgatggctaaattaaatcattttgataaattacaacttaaagagcaacgctttttaacgatttatgattttatattaaatattattgctatgctttcgatttttggtagtttagttctaggattaattcaaattaatgcaggccaactaaatattatttatatgacgagtatcgttttaatggtcttaactttatttgaacaagctgtaccaatgacaaatgtcgcgtattataaagcggatactgaccaagcattgcacgatattaatgaagtgatatctgtaccttctactaatggaaataaccgccttactgataagtatgacgcaacgaacatttatgaagttaaggacgctagttttaagtattggaaccagcaaacgtatgtgttatcggatattaattttaatgttaatagaggcaaaaagattgcgattgtgggtccttctggttcaggaaaaagtacattactacaaattatggcagggttatatcaattagatagtggctctattcgtttcgaaaatatggacatgtttgaaatagatgacaaagataagtttgaatcgttaaatgtcttgctacaatctcaacaattatttgatggtacaatacgtcaaaatttatttaccgatgaaaaagatgaagcggtgcaagcaatatttaagcaattagatttagaacatttggcactagaacgtcaaattgacttagatggtcatacattatctggcggagaaattcagcgtttagcgattgcgaggatgttattaaaagatactgcatcaacatggattttagatgaaccaacaacggcattagataaacaaaatagtttaaaagttatggatttaattgaagcacatgcagaaacattaattgttgctacacacgatttaactatattgtcacgttttgagaccatcattgtgatgataaatggtaaaatagttgaaaagggaaactatcaacaattactcgctaatcaaggtgctttatggaatatgattcaatataatgcataaaaaaactgcttgataggctaagaaacctttcaagcagttttttaactaacaagcttacgcgtgctaattgtttttctattcttaataaattctaaacattactttaattgtcatgacaaaagttaattatttttcctttgtttcatcaaatgcatgaatgactttacctaataagcgattaagttctttaacttcatcttgagataaagaagaagctgaagcgactttgtcagatgcattacttaattctggtctaatagtttcacttttgtcagtcaagtgaataaatacttcacgttgatcgacttcggaacgttcacgcttaattaagtctacttgttccattcgttttaataatggtgatactgtaccagtatcgagtgctaattcagttacgactttcttgacgtttacaggagattcatcccataaaatagttaagacaagaaattgtgggtatgttagattgtacttcttaaaaactttgttagagtagtagcgattaacttgtctttgagcattgtacaaactaaagcatagctgttcttttaaattatgttgatcagacattaaagttctcctccagacatactatccgtttttttctcttttcggattggtaatcattaaaaagttgattgtttattaattcacaactttctttgattcaatgccatgctaaaattaaagtatgtttaaagtttagaagatatttttgattaaatcaagcaaaaagataatttaatatatatatgttatcatttttaaaaataactgtaatagaaaagagaatataaaatgaaaaataataaagatgaaaaaataagaatatccataattaacggatttttgggtagtggtaaaaccacgttactgacacattatattagtgaattattaaaaaatgatgagaaaattaaaatcatcatgaatgaattcggtacttttgatattgatagcaatagtatttcaaatgaaattgaagtccattcattgattaatggttgtgtttgttgcgatcttaaacaagaacttgtctatgaactaaaagccattgctttaaaaggggacgttaatcatgtcatcatagaagcgacaggcattgcgcatcctttagaattactagttgcatgtcaagatccgcaaatcgttaatttctttgaaaagccaattatttatggtgtattagatgcgactcgatttttggaacgtcatcaatataccgaaaatacagtttcgctgatggaagatcagttgaaactaagtgacatgattattattaataaaattgatcttgtaactgatgacagtcttgagaaaattgataagcaattaagtataatttgtgcaagtattccaacttataaaacaacctatggacaagtttcgttggaagaattggacttacctggtaaagacagagagatatcgtctcatcatcaccatcatcatgggattaaaagtatgacttacacgtttacaggtccgattgatcgtcaattgttttatcaatttataatgaaattaccggaatctgttctacgtttgaaaggttatgtatcatttagagatcaaccaaatgcaatttatgaatttcaatatgcatatggtttaccagactatggaataattggcatgcaattaccattaacgattgttattattggtgaaactttagatacaaatcacatacgtaatcaattggatatgctacaatttacgtaaatcacaaaatgtgttgtttcaatttaacggaaatagcacattaatttcttaatacttttgttgtgaatattttgtgacattgagggatggagtggatgagatatggaacaaataatgattaatcactatgttcatttttctaggcttgtacaaggtttttggcgtgcaaatgaatggaatatgactgcgaaagagttaaattattttataaatgaattagttgaacgtgggattacaacgatggatcatgctgatatttatggggattatcaatgtgaatcactgtttggtaatgctttggatttatcacccgaattaagaaataaaattcaaattgttacgaaatgtggtatcattttgccttctaagcaatttgattttacaaatggacatcgttatgatttgagtagtaagcacatcgtgaaatctgttgaacagtcattaatcaatttgaatgtagattatttagatagtctactcattcatcgtccttcaccattgatggatccagaacaagttgctgatgcattaactaaacttgttaaacaaggtaagttgaagtcattcggggtgtcgaattttaatcattcacaataccaattgttaaatcaatatattatgaaagaaagactacatattagcatcaatcaattagaattatcgccatatcacgttgatagtttacaagatggaacaatggattcaatgtatcaaaaccatgttcaaatcatggcttggagtccttttgcaggcggtaaaatattcgacaaggaagatattaaagcgcaacgtattatgaaagttattcaatcaatagctgacaaatatggtgtgagtgacacagctgtgatgatagcatggttagtaaaaataccgcatcgtatcatgccgatacttggaacaagtcagttaaagcgtattgatcaagcaatcgaaggactgcaacttaatttagatgatcagtcgtggtttgacatttacaccgctattatcggacaagatattccgtaaacttatttactttgaaatcataaaggagcatatcatgacaaacgaagataaacgtttcgaacaattaagatttgaacgcaaatttatagttattccgtatgtaatttatgcagtcattgtattactattaaatattttctattctgatttgaaaataacaatgacattattcggacttttctttgcgtataatgtagtcattttgttcatagcatttattaaacattataaacgtacattgttactaagtcttatattaacagtgcttagtggcgcggcattctttggaattatttatgtttatggcattaatcatttttaaatattaaaaagagactatctacaataatctcatttgcattttatctaactaagtttaacttttgcatagaaaaatgatgctatgaggatattcagtagatagtttttttatgatctaatatttaaacttagatatcgttttgtaattaaccgagataactcatcacctagcaatattatttacaaaatagttcgataaaattgtgtattttgcataaattaaaaatgtatgttttaaaaaattgttataattaaattaagataaaacaaaggggtgactgttatgtcagaagaaaaacatgtagtggaacatgaacaacaaaagaaagaaaagacaaaaaagcaatacaagccattttggattgttatgagttttacaatacttatagttatactattactcccagcaccttcaagtctgccaataatggctaaggcagtactagctattttagcttttgcagttattatgtgggtaacggaagctgtatcatatccggtgtcagcaactttaattattggcttaatgatattacttttgggttttagcccggttcaaaatttaggggagaagctaggtaatccgaaaagtggcagtgctgttttagctggaagtgaccttctaggaactaatcatgcattatcattagcgtttagtggatttgcaacttcagctgtagctctcgttgcagccgcattatttttggctgctgctatgcaagaaacgaatttgcataaaagactagctcttttagtgttatcaattgttggtaataaaactagaaatatagttattggagcaatcattgtttcaattgtacttgcatttttcgttccttctgcaacagctagagcaggggcagttgtaccaatcttgctaggtatgattgcggcatttaaagtttctaaagatagcaagttagcgtctttattaataattacttcagtacaagctgtgtcaatttggaatattggtatcaaaacggcggcagcacaaaatatcgtagcgattaattttataaaccatcaattaggatttgatgtttcatggggcgagtggttcttatatgcagcgccttggtccatagttatgtctatagctttatatttcatcatgattaaagtgatgcctccagaaattaatacaatagagggtggcaaagatttaataaaagaagaattgcataaacttggccccgttagcgcacgtgaatggcgtttaattgttatatcgatgttattattactgttttggtcaactgaaaaagtattacatccgattgactctgcatccattactattattgctttaggtgttatgttaatgccgaaaattggtgtcatgacatggaaacatgttgaaaataaaataccatggggaacaattatcgtgtttggtgtaggtatttcactaggtaacgttcttttgaaaacaggtgcagctcaatggttaagtgatcaaacttttggtgttttaggtttaaaacatttacctattatcgcgacaattgcacttatcacgctttttaatatattgattcatttgggctttgcgagtgcaacaagtttatcatcagcgttaatacctgtttttatttcgctaacctctacgttacacttaggagaccagtctataggatttgttttaattcaacaatttgttattagttttggtttcttattacctgttagtgcacctcaaaatatgttggcttatggcactggtacttttacggttaaagatttcttgaaggcaggtataccattgacaattgtagggtatattctagtgatagtttttagtatgacttattggaaatggttaggtttgctttaatttaaaatataaataagaatctaggttattttaaagtgacaaaaagcttaataaaataaaaagataattgaagggtgttttgtttatggcaatagctgtgttattaaatcgaatgtttcgaatggaacacaatccattatttgaatatatttatcaacaaaaagaagacattgatgcatgttattttatcattccggaagaggacatgtcttcagcttctgatttgaaagcacagttttatcgcggtactttgcagcgcttttaccaatcgttgcacgcagaaaagctcacaccttatgtcatgtcttatgacgatatcatttcattttgtaaagaaaacaatatctctgaagtagtgattgcaggtgatattatgagttatcaccttgaagaatatgatattttacatcaacgctctttattcaatgaagcacgcattgccgttactttgatacgtgggaatcattactttaaagcgagtaaaacaatgaatcaacaaggggagccatacaaagtttttactagtttctataaaaaatggcgaccttacttgaggcatagagacgtatatcactatgatttaaaatcattcgaagacttcgtcattgcatcacctgatgatttagtgtttgatgacatagcatttggatcctcacaaataattgaacagaataaatggcaacattttttagatcaagatatacagaattacgaaagcggaagagactatttacctgaagtgttaacaagtcagctaagtgttgctttagcatatggattattagatattattgaaatttttaatgatttattggcgcgttatgatgaagatgaggcaaactatgaagcatttatacgtgaactcatttttagagaattttattatgtgttaatgacacagtatccagaaacctcataccaagctttcaaacctaaatatcgacagataaaatggtcgcaaaatgaagcggattttaatgcatggtgcgaagggcaaacaggatttccaatcattgatgcagcaataatggaattgacacaaactggttttatgcataatcgaatgagaatggttgtgtcgcaatttttaaccaaagatttatttatagattggacatggggagaaaaattctttagaaagcaccttattgactatgatgcagcatcaaatattcatggatggcaatggtctgcttctacaggtacggatgcagtgccgtattttagaatgtttaatccaataagacagagtgaacgctttgatcctaaagctttgtatatcaaaacatatcttccgatttttaatcaaattgatgctaaatatttgcatgatacacatcgaaatgaatctgaattatttaaacaagggattgagttaggtcgtcattatccaaaacaaatagtggatcatcaagaaaagagatctcaagttttagcgacatttaaagcgctagactaattcggctcaattgatagatcaggcatgagtaaaatctggagcagaatataaagttcttaagcaatataaataagccaatttctattattgatgtgatagaaattggctttgctcaaatatataagttgtatttagttttcttattaatttggtgttatcttagtatgtccgtaaataaagtgaggtatagtacgacatactctaaaaatgtagcgagataaatatatttcaatctaacttttatgttttgaggcacttgccatttaggatattgtcgttcgtaatacgacacttgttgtataaatacacctagtccaaatggtagcatcatgagtaagatacttcttaaataacttaaaccaatatcatgccatatgtgtccaatcatcaattgaaagacaatgatagatactattaaaacgattatatttattgtcacttgttcaaacgcactccttttccaaataatagaattgctgcttgcatcacaaccataaaacatacaaacatagcagttttaagcgttagactttctagaatgtgatttagaacatgtaagggttcattaaagaaataaacggaatgtaagcgtaagaaacgaccaatataaattccgaatccatttaaaaacattagtacgaaaacaattaatctattaagccaacggtgagaagtcaatgttagtatttcaaaatagattaaaatcatcacataaaccgctaagaagacaccaagcagtaaataggtaaagtatttccactcacctaaatttagtcctgcgtaaaagttgaattgaaattggttcaaatggattaaatcagttaccatataaaatgtatttggtaaaagtaacacaaatataaaactatatatgataaagagtggccattcatactttttattcggtttgaataatcgtaataatagactaagctcaaaaggtatatatgctaaaaacaaatttaaagtcataaattgaaaaattttagtctcaaaaagggagacgataaataatattaaaaagtaaattctagcgatgtatcgagattgcatcaataataaacactactttctaatgaaaaaagttattcattcaaatgtgatagttataaacgcattcaagtcctaattaaaaatttaatttaactcgttgaagtatattaataaacgagaatgcatttatgattaagcacttatgataacttgtaataaaatttgattcaactaaaaagtaaagtgctattgaggatcaagtaaatttaaaccgactgcatcgttgaatgaacgttgaatgtccaaatcagttacagtaagaatgatttcagcagttgcagaaacaattgctttagcgagatgtccgctaaaagtttcatatgattgagtaccgaaagtagcatgcaaatgtgcaaaatgaccattgtctagacgagaaatattacctaataagctcgtcaattccaatggctcagtaatatgtttttcttcgtattgtttcgttgttaaattgaaaaattttaaaatgacgtcatcacatgcaccaatgccgctgacagatgtaaatgttaagtcttggtcatctgcaaagtttgttatacattcaacgatatcttcgcctttttctaacactagtagtatagtatgattacttttttgcaatttcatatgatcaatcccctttattttaatatgtcattaattatacaattaaatggaaaatagtgataattacaaagaaaaaaatattgtcaaatgtagcaatgttgtaatacaatatagaaactttttacgaatatttagcatgaattgcaatttgtcgtggaaaagaagaataacagctttaagcatgacatggagaaaaaaagaggtgagcatatgaataaacagatttttgtcttatattttaatattttcttaatttttttaggtatcggtttagtaataccagtcttgcctgtttatttaaaagatttgggattaactggtagtgatttaggattactagttgctgcttttgcgttatctcaaatgattatatcgccgtttggtggtacgctagctgataaattagggaagaaattaattatatgtatagggttgattttattctcagtgtcagaatttatgtttgcagttggccacaatttttcggtattgatgttatcaagagtgattggtggtatgagtgctggtatggtaatgccgggtgtgacaggtttgattgcagatgtttcaccaagccatcaaaaagcaaaaaactttggctacatgtcagcgattatcaattctggattcattttaggaccagggattggtggatttatggcagaagtttcgcatcgtatgccattttattttgcaggtgcattaggcattttagctttcataatgtcagttgtattgattcatgatccgaaaaagtctacgacaagcggcttccaaaaacttgagccccaattattaacaaaaattaattggaaagtctttattacgccagcaattttaacgctcgtcttagcgttcggtttatcggcatttgaaacactgtattctttatatacatcgtataaagtaaattattcacctaaagatatttcgattgcgattacgggtggcggtatctttggtgcacttttccaaatttatttctttgataaatttatgaaatacttctctgagttaacatttattgcatggtcattaatatattcagttattgtattagtgctattagttattgccgatggttactggacaattatggtaattagctttgttgtctttatcgggttcgatatgataagacctgctattacaaattatttctcaaatattgctggtgatagacagggatttgcaggtgggttaaactcgacattcactagtatgggtaatttcataggtcctttaatcgcaggtgcgttatttgatgtacacattgaagcaccaatttatatggctataggtgtgtcattagcaggtgttgttattgttttaattgaaaagcaacatagagctaagttaaaacaacaagatttgtaatatcgcacatggttgtcattcgattcatgtattttgacaactaaagcatttcaatataagcatcgattttcttacaattatagtgaagaaaagtcgatgctttaaatttataaagattaaaaacttttaaatgttttagtctttatatttaaatgttatatgtaacaaaaaatgattttgagtaataaacgtgttacaaatattacattctttttaaattgcaatccacatacctaattcattaacgttaatgtgttaagatgataaaaaaatgagtaaggaaatgtgggtaaggggatgacagtaaaaaatttatttttaggctttgttgctataatattaaccgtttgtttaattggtttattaatattagcaacaaatgaagatgcgcttgctaaggtacataaaacgattaatacgcttaacgcgataaatgtatcaactgaagatacttataaaaagaaaatggatattctcaatattcatactgctaaagcgtctgaagtgaatgaaaatgtgaaaaagcaaaatcattttaagcatcgtgtgaatgcaaataaatcaaattcttttaacgaacaagagtgccaagttattgctgatcgttatgcagataagcatatcaatgataattatggtttagaaagaatttctaagacaaatcatggatataattatgtttattccaatgataattcaactagtaagcaacatgtaagtatttcaaatcaaggcataataacgaaataatagatggaacagtgtattctaattggatatactgtttttattttgcaatattttaatttaaaaaggtgaaatcaacttataaaatgatgtaaatgttatgtcaaaatcaactaatccgtaatgtattttaaaatgttaatatagttctgaagaagtataaatgaggtgttgaaatggctaaaaataagaaaacgaacgcgatgcgtatgcttgatcgtgcaaaaattaaatacgaagttcatagctttgaggtaccagaagaacatttatctggccaagaagtcgcagaacgcatacaagcaaatgttaaaacagtatttaaaacacttgttctagaaaatgcaaaacatgaacattttgtatttgttatcccagtaagtgaaactttagatatgaaaaaggcagctgctatggttggagagaagaaattgcaacttatgcctttagataatttaaaaaatgtaacgggatacattcgtggtgggtgttcacctgttggcatgaaaacattgtttccaacagtcgttgacaaatcctgtgaaaattatagtcatatcagtgtgagtggtgggcttcgaacaatgcaaatcacgatagctgttgaggatttgattacaataactaaaggcaaaattggagcagttatccatgaatgattaataacaacaaaaagtatggggcaagattaggagtgtgacagagatgaaatttttataaaattcatttctgccacactcctttttgattgaattagcattttacgatcataaacagtcatgataattgagtatttgaacataaaaatgtaattttatcgtcacaatttgattgtttgtgattgtttttggtaatttatgattgaaaagtgaaagcgtactcattataatacagagtgagatggggtgatgatgataattacagaaaaaagacacgagttaatattagaagaactttcgcacaaagattttttgactttacaagaattaatagatcgaactggttgcagtgcttcaacaatacgaagagatttatccaagctacaacaattagggaaattgcaacgtgtgcatggtggtgcaatgttaaaagaaaatcgtatggttgaggcgaatttaactgaaaaattagcaacgaatctcgatgaaaagaaaatgattgctaaaatagcagctaatcaaatcaacgataatgaatgcttatttatcgatgctggttcttctacattggagctaattaaatatattcaagcgaaagatatcattgtggtaaccaatggtttaactcatgtagaagctttacttaaaaaaggtattaaaacaattatgctaggtggtcaagttaaagaaaatacacttgctacgattggttcaagtgccatggtgatattaagacgatattgtttcgataaagcttttatcgggatgaatggattagatattgaacttggattaactactcccgatgagcaagaggcattagttaaacaaacagcaatgtcattagccaatcaatcatttgtacttatagatcattctaagtttaataaagtatattttgctcgtgtacctttgctagaaagtacgacaatcatcacatctgaaaaagctttaaataaagaatcgttaaaagaataccaacataagtatcactttataggagggactttatgatttatacagtgactttcaatccttcaattgactatgtcatttttacgaatgattttaaaattgatggtttgaacagagcaacagcaacatataaattcgccgggggaaaaggtattaatgtctcacgtgttttaaagacattggatgttgagtcaactgctttgggatttgcaggtggatttcctgggaaattcattgcagatacattaaataacagtgcaattcaatcgaattttattgaagttgatgaagatacacgtattaatgtgaaattaaaaacaggacaagaaacagaaatcaatgcaccgggtcctcatataacgtcagcacaatttgaacaattgttacaacaaattaaaaatacaacaagcgaagatatagttattgttgctggaagtgtaccaagtagtattccaagcgatgcgtatgcgcaaattgcacaaattacagcacagacaggtgctaaattagtagtcgacgctgaaaaagaattggctgaaagcgttttatcatatcatccactatttattaaacctaataaagacgaattagaagtgatgtttaatacaacagtgaactcagacgaagatgttattaaatatggtcgtttgttagttgataaaggtgcacaatctgttattgtctcacttggcggtgatggtgctatttatattgacaaggaaatcagtattaaagcagttaatccacaagggaaagtggttaatacagttggctctggtgatagtacagttgcaggcatggtggctggaattgcttcaggtttaacgattgaaaaagcattccaacaagcagtcgcatgcggtactgccacggcatttgatgaagacttagcaacacgggacgctatagaaaaaataaaatcacaagttacgattagcgtacttgatggggagtgaaaataatgagagtaacagagttattaacaaaagatacaatagcaatggatttaatggcaaatgacaaaaatggtgttattgatgaattagtaaatcaattagacaaagcaggtaaattaactgatgtcgcgtcatttaaggaagcgattcacaatcgagaatcacaaagtacgactggtatcggcgaaggtattgctattccacatgcgaaagtagcagcagttaagtctccagctatcgcattcggtaaatctaaagaaggtgtagattaccaaagtttagatatgcaaccagctcatttattctttatgattgcagcgccagaaggtggtgcccaaacacatttagatgctttagctaaactatctggtattttaatggatgaaaatgtacgtgaaaaattattacatgcatcgtctccagaagaagtgttagcaattattgatcatgctgatgatgaagcgacaaaagaagaagaggcagaagctgaagcacaacaagttgctgctgtagaagcaaatcaagacactaatggatcaaacgagccatatgtattagctgtaactgcttgtccaacaggtattgcacacacatatatggcacgtgatgcattgaaaaagcaagcggataaaatgggcattaaaattaaagttgaaacgaacggttcaagtggtattaaaaaccatttaacggaacaagatattaaaaatgcaacaggtatcattgttgctgctgatgttcatgttgagacggatcgcttcgatggtaaaaatgtcgtagaagtaccagtcgcagatggtattaagcgcccagaagaattaattaataaagcattagatacaagtcgtaaaccttttgttgcccgtgatggtcaaagaaaaggtaactcaaatgacagtcaagaaaaattaagcccaggtaaagctttctataaacacttaatgaacggtgtttctaacatgctaccacttgtaatatctggtggtattttaatggcaatcgtgtttttatttggtgcaaactcatttgatccaaaaagctcagagtacaatgcgtttgcagagcagctttggaacattggtagtaaaagtgcattcgcgttaatcattccaattttatctggattcattgcacgtagtattgcggataaacctggattcgcttcaggtcttgtaggtggtatgttagcaatttcaggtggttcaggatttattggtggtattattgcaggtttcttagcaggttacttaacacaaggtgttaaagtgattacacgtaagttaccacaagcattagaaggattaaaaccaacattaatttacccactattaacagtgacagctacaggcttattgatgatttatgtctttaatccaccagcatcttggttaaatcatttattattagatggattaaataatttatcaggttctaatattgtattattaggtttagttattggcgctatgatggcgattgatatgggcggtccattcaacaaagcggcatatgtttttgcaacaggtgcgttgattgaaggtaatgcagcaccaattacagctgcaatgattggtggtatgattccaccgttagcaattgcgacagcgatgttaattttcagacgtaaatttacaaaagaacaacgtggttcaattatccctaactatgtgatgggtatgtcctttattacagaaggtgcgatcccattcgcggctgccgatccattacgtgttatcccttcaatgatgattgggtcaggtataggtggcgcaatcgctttaggtttaggttctcgaattactgcgccacacggcggtattatcgtaattgttggtacggatggtgcacatttactacaaacacttattgcacttgtagtaggtacattagtttcagcattaatttatggacttattaaaccaaagttaactgaaacagaaatcgaagcttcaaaatcaatggacgagtagttttaatgatttaaaatgattgttagcaaagagcttcatattaagttgtaagttcaatgaatatatgttagttttatatatcgtgttaacgatagcttttacaaagttataaaaacactttctattaattcagtttttatgaattgatatgaaggtgtttttatttttagataaatgaatgaagaaataaacaccacaaatgtatagacttttttaatattttgcaaaaagttatgccaaacgaagcagatatagtaaaatatgagtgtcttaaagtgaaaatttataaataaagaagggtttatacgtgtcagaattaattatatataacggcaaagtttatactgaagatggcaaaatcgataatggttacattcatgtgaaagatggacagattgttgcaattggagaagtggatgataaagcagagattgataatgatacgacaaataaaattcaagtgattgatgcaaaaggtcatcatgtagtgccaggttttatcgatatacatattcatggtggttatggacaggatgcaatggatgggtcatacgatggcttaaaatatctatccgaaaatttgttgtctgaagggacgacatcgtacttggccactacaatgacgcaatcgactgataaaatagatactgcaattataaatattgctaaatatgaagtggagcaagatgttcacaatgcagcggaaattgtaggtatacatttggaaggaccatttatatctgaaaataaagttggtgctcaacatccgcaatacgtagtacgcccatttatcgataaaattaaacattttcaagagactgctaacggattaataaagattatgacgtttgcacctgaagttgaaggtgcaaaagaagcgcttgaaacgtataaagatgacattattttttcaattggtcatacagtggcaacatacgaagaagcagttgaagctgtcgagcgaggagctaaacatgtcacgcatttatataatgcagcgacgccattccaacatagagaaccaggtgtttttggagcagcatggttgaatgatgctttacataccgaaatgattgttgatggcacacattctcatccggcatcggttgcaattgcttaccgtatgaaaggtaatgaacgtttttatttaattaccgatgcaatgcgtgcaaaaggtatgcctgaaggagaatatgatttgggtggccaaaaagtaactgttcaatcgcaacaagcacgtcttgcaaatggtgcgcttgctggtagtattttaaaaatgaatcatgggttacgtaacttaatatcatttacaggtgatacattagatcgtttatggcgtgtaacaagtttaaatcaagccattgcattaggtatcgatgatagaaaaggtagtattaaagtaaataaggatgcagatcttgttattctagatgatgacatgaatgtaaaatctacaataaaacaaggtaaggttcacacatttagctaatagataatcataattaaatgtatgcaatagatttaatctgttaacataagcactttatattatgataaaatagaagcaataacatttttttctgggggtgtctaaatgggaaggcgataacatgtagttgtaatttaagtcatagtgataaatttgaatgcgtgttacccatgagtgacacatataacatggaggtgaatccctagaaatagggaattaattggaaacttcgaccataattagtttgattatatttattctattaattgcattaaccacagtatttgttggttcagaatttgcattagtaaaaattagagcaacaagaattgaacagctagcagatgaaggaaataagcctgctaaaatagtaaaaaagatgattgctaatctagattattatctttctgcttgtcagttaggtataacagtaacatctttagggttaggttggcttggtgaaccaacgtttgaaaagctattacacccgatatttgaagcaatcaatttaccaactgcattaacgacgacgatttcgtttgcagtatcatttataatcgttacgtatttgcatgtagtacttggtgaattagcgcctaaatctatagcgattcaacatactgaaaagcttgctttagtatatgcaagaccattgttctatttcggtaacattatgaaaccattgatttggctgatgaatggttctgcacgtgttattattagaatgtttggtgtaaatcctgatgcccaaaccgatgcaatgtcagaagaagaaatcaaaattattattaacaatagttataatggtggagaaatcaaccaaactgaattggcatatatgcaaaatatcttttcattcgatgaaagacatgcaaaagatattatggtacctagaactcaaatgattacactaaatgaaccttttaatgtagacgaattacttgatacaataaaagaacatcaatttacacgttatccaattactgatgatggtgataaagaccatattaaaggatttatcaatgttaaagagtttttaactgaatatgcttctggaaaaacaattaaaattgcaaactatattcatgaattgccaatgatttcagagacaacacgtatcagtgatgcattaattagaatgcaacgtgaacatgtacatatgagtcttattatagatgaatatggtggaacggcaggtattttaacgatggaagatattttagaagaaatcgttggggaaattcgtgatgaatttgatgatgatgaagtgaatgatatcgttaaaattgataataagacattccaagtaaatggtagagtactattggatgatttaactgaagagttcggtatagaatttgatgactctgaggatattgatacgataggtggatggttacaatctcgtaataccaacttacaaaaagatgattacgtggatacaacttatgatcgctgggttgtttcagaaatcgataaccaccaaattatttgggtaatgttaaactatgaatttaatgaaccgagacctactatcggacagtctgatgaagatgaaaaatcagaatagatagtaatatataaaccaactaagaatgatttaattcattcttggttggttattttttgactaaaattaaagaaaaatgaaaatagtcttgaactcaatatctataatgatttaatgaatattttttattgaaagcgataattcatattaattgagtttgttgaaaaatttagggtaatgtaaagatataaaagatacatagattggagagatataaagatgttgaatgagatacaaatattaaataatggatacccaatgccttcagttgggttaggtgtttataaaatctctgacgaagatatgactaaagttgtaaatgctgcaattgacgcaggctatagagcgtttgatacagcatacttttatgataatgaggcttcactaggacgagcattaaaggataatggcgtagatagagaagatttgtttataacgacgaagttatggaatgactatcaaggttatgagaaaacattcgaatatttcaacaaatcgattgaaaatttacaaactgattatcttgatttatttctaatacattggccttgtgaagcagatggtctatttttagaaacatataaagctatggaagaactttacgagcaaggtaaggtaaaagcaataggtgtatgtaattttaatgttcatcatctagaaaaattaatggctcaatcaagtatcaaaccaatggtgaatcaaattgaggtacatccatattttaaccaacaagaattacaagaattttgtgatcgtcacgatattaaagtgactgcatggatgcctttgatgagaaatagaggactactagacgaccctgtcattgttaaaattgctgaaaaatatcataaaacaccagcacaagttgtattgcgttggcatttagcacacaatagaattattattccaaaatctcagacacctaaacgcattcaagaaaatatagatattttagattttaatttagaattaacagaagtagctgaaattgatgctttaaatagaaatgcaagacaaggtaaaaatccagatgatgtgaaaattggggatttaaaataactggatgttaaattttacgtttatgaatgtcttttaatgtgtacattaaaataaatgagttggtttttactatttgataaaacaatactcaggtacattcaaaatcttttaaataaaaaggatggacatagatgaaaattagagtcgtcattccttgttttaatgaaggggaagtcattacacaaacacatcaacaattaactgaaatactttcacaagatagtagtgtgaaaggctatgattataatatgcttttcatagatgatggtagtacggataccactatagatgaaatacaacatcttgccacaatagatagacatgtcagctttatttcttttagcagaaattttggaaaagaagcagctatgattgcaggttaccagcatagtactgaatttgatgcagtcatcatgatagattgtgatttgcaacatccacctgaatatattccgaaaatggttgaaggttttatggaaggctatgatcaagtgattgcaaagcgtgatagaagtggtgaaaattttagtcgcaaaacattaagccatttgtactataagttagttaattgctttgtagaagaagtacaatttgatgatggtgttggtgattttagacttttaagccaaagagctgttaaatccattgcatcacttgaagaatataatcgattttcaaaagggttatttgaatggataggatataatactaaagtgtttacgtatcaaaatgttgcgagacaaaaaggagaatctaagtggtcctttaaaaagttatttaattatggtattgatggcttgatttcctttaatagtaaacctttgagaatgatgatatatcttggcttatttattttttcaattagcgtgttatatattatctatttattcatcaatattatgatttctggtgttaatatcccaggatatttttcaacgattgcagctattttattattaggcggcatacagttaatttcaattggtgttgtaggtgaatatattggcaggatatattatgaagttaaggcacgtcctaaatatattattcaagctacaaatctttcaagtattgaaaatgatgagaaggatacccataaagtttactctaaataaacaaataaaagaagccctcatcaatgagagcttctttttagtctttgcattttattttataaataaatcggattatgacgtaatgtctaatttgtgtaatgttacagtcatcgtagttcctacatctatatcactgcttacactgatttttgcgttattttgttgcgcgagttcattagctatatataagcctaatccagaaccacccgtttttgtattacgagagttttctactctgaatgttcgttcgaatatacgttcttgtagttctggtataatgccaataccttcatcgctaatagcaatgtcgatagtatcttgatctttgttttcactaatattaatatcaatgcgactaccaacatttgaaaattttagcgcattatcaagtaagtttgttaaaatacgctcaagtggcgttcgatattgataaaatgcatcaatttcgctacagaaattcacttctaatgtgcggttctcatgtttgatacgttgctcatatggttgcaatattgatacaagtaattggtctagttgtattaattctgggggatatgttttacctgtatttaaagtgataatatgagtcatatcatcaaataatgttgataatctgtttgcttgtttaattaatatgtcgtatgactctttaatctcatgatcctttgtgattataccatcacgtagtccttcagaatatgaaataatgcttgctaaaggtgtttttaaatcatgggctaagttttgaatcagttctgttttttcttgttgttcggatttaatttgattcatttgttgcgtaatttcagaagccattttattaaaagattgatttaattcataaatttcttttggtgaattaaacgttttatcattgcttgcgtaatttccgttagcaaattgcttagtttttatattaaactgcttaattttttgtataagtggattaataaaaatactacatattaataaggttaaacagcttgtaattattgtcgttaaggtcaaagttagtgtcatatggccgttaaaccacattaaaatatatgcaattgctaaaatagttgaagttaatagtatactcgatacgacgccaataatgatttgacttctaattgataacaccattatcggctcctttcaaatttatatcctaatccccatacagttgtgatggtatatgttgtaaagctctctttttctaatttttctctaatacggtgtatatggacattcacggtattagcatcttcgtaatagtcatatccccaaactttttcaagtaattctgatttagaaataacttcattttctctagaagctaaataccacaataactcaaattccttaatacgcatagggacttcgtgaccatttacagtcacaactttacttaagttaataagtgttaattcatcaaacgacagttgttcaactggttgatgatggtatttcttcattcttgtaagtaaattattaatacgtaaaacgagttcccttggactaaatggttttttgacatagtcatctgcacctaaagttaaggcgtaaatggtatcatgttcttgtgttttggcagttaaatagataaaggggatatctaatttttgccttttcatttctttgacaatgtcgtaaccattaacttctgtcatcatgatatcaagtaccatgatatcaatatcatttgatagtaaagaaattgcttctttaccgctagttgtcgttgttactttgtaaccttcatattcaaaataggtttgacaaatgtctacaatgtcttgttcatcatccacgatcagtaagtgggtcatctattttttcacctctgttcttacgacctctaaagtaattaatgatttctttaagtgaaatctgttttaacaatgagtgactcattagtaaaaggataaagaaagttaattgaagaggatacgtaaatatcatatctgctaagatataatttatcataacaaaggctccaaagaaactagcagcatatgcaaaaactccaaaaattaaacctaatccaattgcaatctctccaagtggaacaataatatcaaataatgacgtcgtatgtgcaactatatttgcgaaaaaccacttataccactctggtgaatcagtattgttagctatgactggtactagacctttcagcgtaaatccgcccgttaatttttcgtagccttgcattaacataacaatacctgaacccacacgaatgataaatgtaacgagtagcaataatttattcatgatgttcacattctttctatttattgtgtgtaatttatataaacataagattaagcaacataatgcgatttgtagtgttatgtgaacaggaagtgtttgagctcatgggctgcttaagctaaacaaacctcaagctctaaaaaaatttacttatgtgctctacaatcttatggaatttaatagttgtatatatattgaaaaaaggaaagtatgatttctacaagctaggggggctgtgaaatcatacgcttccattgagtaatgagtgtaatgtatatttttaaaatttgtaatgtatagtaatagtatgttgtaaataaaagtttaactcagaaattgattattttaatttagcgccgccgaagatgacgtgagcttttttacaatagattgttacttcatcatatttgcttaaatctacatttttaagatcaaatgtttgtttttctttatcgtagtcaaccattgcgatttctttaccgtttttaatgtcgccattttttgttagatagacgtataaatctggaccttttgatgatttgtagttagtaagcattaatttaccatttttaatctcagctttaccttcaacagtttcaccgtttttagaactgaatgtaccagttaggtgttttgttttatcagttttaacattgctatcttctgactttgttttttgttcagttttgttaccttgatcttgtgaattagaattaccacaagcgcctaaaattaatacagaggcaacagcaccaactgctaaaaaatattttgtattcatgctaactcctcatttcttcaatttgataagttaagtttaaaatgaaggcaaataatatgccattaactaattcttaacttcgtttaaatatcgcttaactaatattgaagaaagaataatttgaaaatgaaaataattgtctgatttaaataaataggagtcaaaataagaggagggcggtttttttaagtaagaaaatatttgtctgaactacttatcactaaaaaacacttctgatatagcgaattaagaatatcagaagtgttttttagttttggtattaaaatttataaaccttttgccaaaataaaaacaacaagaaaataagatagacgattaaatacaagtaccaatatggtgttaaaaccatcataacgataaatgaaatgttaataatgataagtcctttaatcattagtttctttattttattattattttcagcagattcatctaagctattaaatgttgaaataaataacataataccaccaatgatgaaaatggcaggggctaaaaatggaatagacatatatattgattgtgtacttgaaaagtcggtaacacgttgcgttaaactgacaacaatcgttaatatgatagcaataaatttttggtctgtaatgtatacaggttttaattttttatcaatgtaaaactgtagtatcgtccaaatgataaacatcgttatagtacacagagtaataaagttatatttatcaattatgaatgtatttataaaggcgtttatagtaatagataacaacattgcacttaatgataaatgttgcatttgatgcctatataaattgaatccagttataagtacgacgatagcaatattaattaatatatatacaatcatgatggactcctgttcgttatacttcaatcaactattatatcaattaatatattgttattcattagatatgacttgtaaaaagtaaaataagttatcctttatacaccttttttattactccaaagtaatgtatgaagttgtggtaacacataaacgtgattcatatcattactttgcataactaaatctaccaactgctcgtagcgttctaacaacttttcggtatgattatctacgctgtctgataaatatgggttaccaacttgtaaatagaagggaatatctggataacggtggtgtatcattttggcaaaatcataatctttatcgtcgaatacaactacttttaagtttaatgaggaaggtacgcattgtgcaatcacttcatctaatttttttaaatcaggcgtcatagttgaacttggtggttttggactaatcgttaaatcatcaatttgtgtcatccaaggttggaatttactgccttgtgtctccagtgcgctgaaaatacctttatcttgaaataagtcaactaactcttggatacctttaattaatgctgggttaccaccagaaattgtaacgtggttaaataaatcgccaccaattcgttttaattcatcataaatttcttcagcggtcatgagttttatatcgcctttagcactaccatcccaagtaaatgcagaatcacaccagctacagcgataatcacatccagctgttcttacaaacatcgtttttctaccgattactcgaccttcaccctgaatggttggaccgaatatttcgagtacaggaattttagccattagttacacctgttcctttggtctaaatacgacataacttgttggtgtttctcttacaaatacttgaatacattttggttggtgttcgagcgatgccaaattttctttaacaatttgataaattgtttccgctacgatttcagttgaagggattttgtttttaaaagcaggtaagttatttaacagttgatggtcaaatttaccgtgtatcatctttttcaaatggctaaagttcactaaaaagccagtgtcatctagtttatcaccgacaattgttaaattaacaaagtaagtatgaccatggacattttgacaaatacctgcttcttcacacggaatgtgatgtgcagctgaaaaattaaaatctttatttaattcgaattgatatggatgcgttgtactaggatagatttgttgtaacattttaaagcgctcctttactttcaagatattgatttagtccacgttgacgtaaatgacaagctggacattcaccacagccatccccaatgataccgttatagcatgttaatgtttttgtacgaatataatctaaaacttcgagttcatcacttaatttccacgtttctgctttgtttaaccacattaaaggagtatgaataacaaaatctttgtccatagctaggcttaatgttacgttcattgattttataaaactatcgcgacagtctgggtagcctgaaaagtctgtttcacatacgcctgtaataatatgcttagccccaatttgataagctagagcacctgcaaacgacaagaaaagtaaatttctagctggaacaaatgtattaggtataccatcttcattattagtaatttccatatcatgttgtgttaatgcgtttggagtaagttgtgataataatgacatatctaaaacgtgatgtttcattccttgatcttgtgcaatttgttttgcgacttcaatttcagtatcatgtctttgaccataattaaacgttacgagttcaacttctttgaaatgtttttttgcataaaagagacatgttgtactgtcttgaccaccactaaagacaacgatggctttttcattatttaatacactttccattttgtaattgctcctatcattaataatattaataaagaggttaatggcattgataagcccgtttttaatttataaaataaaaaaagcctatctccataaaagatagacgaaagaaatgggttgctcctataatatatattaaaggtttaccaacgaatgtttgaaatttcaatgtctagttttttatagagggtttcagctaggaacctctgatattcatttatgtacgatgaaatagaatataccatatattagttaaaatcaaggtcaggataatgacaatgcctttaaagttttagctacatccaatacatattataaaaataaaacacatttagaacggagtatacaatgattctagtcatagataataatgattcatttacatataatttaatagactatattaagactcaaacgaaactaacagttcaagttgttggtattgataatctgctgatagaagacgtcattaatatgaagccaaaagcaattgttatttcacctgggccgggtaatccggatgattatcctatcttgaatgaagtgttagaacaattttatcagcgtgtacctatactaggtgtatgtttaggatttcaatgtatcgtgtcttattttggtggaaatatcattcacggctatcatcctgtacacggacatactacacagttacgccataccaatgaaggtatttttcaaggactgcctcaaaatttcaatgtaatgcgttatcattcattaattgctgacggagctacttttccaaattgcttaaagattacagcaaaaaacgatgaagcgattattatggcagttgagcatattacatttccggtttttggtgtgcaatatcatcctgaatctattttgagtgaatacggttatcgacaagttgaattatttttatcgaaggtaggtgattactgtgagaatagaatataattatcgctactatttaactgaaaatgaatataagcaataccatattcaattaaagggatttataaagaagtatgttgccactaagttggctgatgtgggagaagtgatacactttgcacaagcgcagcaacgacaaggtagatatgtttcgttatatttaagttacgaagcggcaaagtactttaatcatgttatgtgttcacattcattagctaaagatgatatttatgcagtagcttatagttttgaaaaagcggaaagcataaattcaacatatgaacatcaaacttcttatgtatcaaagcatcatttttcatttgttgaatcttctgaggttatgatgactaatattaaacgtgtccaacaagcaattgttgaaggcgaaacgtatcaagtgaactatacggcgcgcttaacggataacatttattatcctattagtactttatatgaacgattaactcaatttagtaatggtaattatactgcgttattacaaacagatgaaatccaagtagcatctatctcaccagaattattttttcaaaaaggacagtttaacaatgtcgataacgttatcataagcaaaccgatgaaagggacaatgcctagaggtaaaacggaagctgaagatcaacagtattataaaacattgcaaacttcttcgaaagatcgtgcagaaaatgtcatgattgttgatttactaagaaacgatatagggagaatatcacagagtggctcaattaaggtgtataaactatttttcattgaggcatataaaactgtatttcaaatgacttcgatggtaagtggaactttaaaaactaatacagacttaactcaaattttaacatcgttatttccttgtggttcgattacaggtgcaccgaaactaaatacaatgaaatatattaaacaattagaaagttcacctcgtggtatatactgcggagcaattggactattacttccaactgaagatgataaaatgatttttaatattccgattcgtactattgagtataaatatggacaagcgatttatggagtcggagcaggtattacaattgattctaagccaaaagatgaagtgaatgaattttacgcaaaaaccaagattttggagatgttataatgcaattatttgaaacaatgaaaattgataatggacatatccctagacttacttatcatactaatcgcataaaatgttcttctgagcgattaaactttaaatttgatgaacatgcatggcgaaatgaattaaacgatgtaacaacaaagtatcacagtggccaatatagacttaaaatcgtattacatgctgaaagcgaattcgaaacgatagtgtcacctttacctgagaaaagtagttttacagcaaaatttcaagtgttgcccaaagcagttaatccaacttttataaataataaaacgacagaacgaaagcatttagcacacaatcatgaaacggatttaatattgctaacttcagaggacggcaaggtccttgaatttgatattggcaacgttgtcattgaagaggatggaaaatggtacacaccaagttataaagatgatttcttaaaaggatgcatgcgtgattatttaatagatagtgacaaacttgttgaaaaagactttaataaaaacgaattgatttataaatatcataacaatgagatacgtttatttttgataaatagtttacgagaggttgccgatgtccacctttgcctttaaaattagtatgataataatgtagaaaatgaagtaaaaacaaatttaaaaattaaatggggccaaatatgattattgtttatattgtgctgttgttaattcttgtatacgtaaattatcgattagtgaatcgattgctatctgaaaatagaatatatgttgttcgtttgatagcaacaattactactgttataagctttatcattgtatacgcattaattcgcgaactcatgccttttgttgtgcgagcaatggatttaatgtatcaccaataaatttagtgagtaggtaaatgaactattcaatcgattctataattaaaaatcaaagtaaagtaaccaaatattgaagaggtgtacaaatgaaaatatatagtcaaggtgaccaagccattgtagtcacaattgaaaaagaagtatctaaaagtttaaccgaagatttattaacacttcgctcatatttaattgaacaaaattatccatttattatagaaattgtgccatcagaatcagacatgatgattgtctatgacgcaagggatatgattaaacaccataatatacaatcaccttttttatacatgaaagcactaatagaatcgattcatttaaacataaaacatgattttaaccagcaagatttgattgaaataccaattgtgtatggttcgaaatatggtccggatttagaatcacttttaaaacattacaaaatcaagctagaaacatttattgaattacattctaaggcgcaatattttgtttcgatgatgggatattcacctgggtttccttatttaactggattaaataagaaattgtatattaatcacacgagtaaacagaaaaaattcattccggctggttctgtagtacttgaagggaaaaaatgcggtattgtaactacagatacaattaatgattggttagttattggttatacaccattatcactttttaatccgaaagaatcagatttcgcacgcttaaagttaggcgataatattaaatttagacctatcaatgaaaatgaattagaagtaggagcgtttaaagatgtcaatcataattgaaaaaagtggcttattcagtagctttcaggactttggtagaaggggatatgaacatgatggtgtaattccatgtggtgcacttgatactttagcacatgaaattgctaatcgattagttgcaaatgacaagaatgaagcaactttggaaatgactaataaaatggcaacgattcgttttacagaacctacgctgattgcattagcagggggtaatgtcaaagcttacactgagcaaatgactatatctccatataaattgtatttgttagataaaggcgatgttttaaagtttagagaaacaagttatacatcgcgagtgtatttagctgtgggaggtggatttgaattagatgcatggttaggatctaattcaaccgactttaatgtaaaaattggtggttttaaaggaagaacattacaagatggcgatgaaataaagcttaagagagattatacagctcgtcatcataagttatttgaaaaccttgctcacacgaaacaaacagattggggcattgatgggtacgccttgtcatttaattatatgtctgatgtatttcatgtcgttaaaaataaaggtacggaagattttaaagaagatgccattcaaagatttgtgaaacatgattataaagtaacgagcaaagcaaatcgcatggggatgatgcttgaaggtgaaaaaatcaaagctttttatgaagatatgccaccgtatcagactgtcaaaaaaggaacgatacaaattaagcgtgatggcacacctattatcttattaaatgatcattacacgctaggtagctacccgcaaatcggtacaatcgcaagttatcatttaacgaaattagcacaaaaaccgcaaggatcacgtttgaaatttcaatttatagatattttaacggctgaaaagaaccttgttaagtatagtaactggttaaaccaattattccatggaatagaatatagaatgcaattagaaatgatgaaataatatttggtacgtagctcatactcgagtccgatgcaaataatttcctcctaatgtataatgaaataatactgtgttttatctgcgaaatgtatcatatactaattcgtttcacagtaaaatgaaaagataaagtgtgtttttacttgaattttgactaaaattactctatatttattaattgagctatgcttattattacaatttgattacaaattttaaatttgttaattgaatgataattttaaataaagaaacttacacaagcaattatgagttgtagcccaaaatacttgttaaatcaaagttgaaagctacaaataatgaaaattataaacttgaatctgaaagtaattactataattatgacaatgttaacttttaaacgcacttattaattaactacataatgttaatatctaatttattcaagtactttcgcaagatttattatctaaataacgggggaaagaatcatgagttcacaaaaaaagaaaattagtctttttgcgttcttcttattaaccgtaataacgattaccttgaagacgtatttttcttattatgttgatttttctttaggtgttaaaggtttagtacaaaacttaatattattgatgaatccttatagtttagtagcactagttttaagtgtgttcctattctttaaaggcaaaaaagcattttggttcatgttcataggcggcttcttattgacgttcctattatatgccaatgttgtgtactttagattcttctcggattttttaacgtttagtactttaaaccaagtaggtaacgtagaatctatgggtggtgcggttagtgcatcattcaaatggtatgactttgtttatttcattgatacgttagtttacttattcattttaatatttaaaacaaaatggttagacacaaaagcatttagtaagaaatttgttcctgtcgtaatggcggcttcagtagcattattcttcttaaacttagcttttgctgaaactgacagaccagaattattaacacgtacatttgaccataaatatttagtgaaatatttaggaccgtataactttacagtatacgatggtgttaaaactatcgaaaataatcaacaaaaagcattagcatctgaagatgacttaacaaaagtattaaattatacgaaacaacgtcaaacagagcctaacccagaatattatggggtagcaaagaagaaaaatattattaagattcacttagaaagtttccaaaccttcttaattaataaaaaggttaatggaaaagaagtaacaccgtttttaaacaaattatcaagtgggaaagagcaattcacatacttccctaactttttccatcaaacaggtcaaggtaaaacatctgactctgaatttacaatggataacagtttatacggtctaccgcaaggttctgccttttcattaaaaggagataatacgtatcagtcattaccagcaattttagatcaaaagcaaggttacaaatctgatgtcatgcacggtgactataaaacattctggaacagagaccaagtatataaacactttggtatcgataaattctatgatgcaacatactatgacatgtcagataaaaacgttgtaaacttaggcttgaaagacaaaattttctttaaagattctgctaattatcaagctaagatgaaatcaccattctattctcatttaattacattgactaaccactatccattcacattagatgaaaaggatgcaactattgagaagtcaaacacaggtgatgcaacagttgatggttatattcaaacagcacgttatttagacgaagcattagaagaatatattaatgacttgaagaaaaaaggattatatgacaattcagtgattatgatttatggtgaccactatggtatctctgaaaaccataacaatgccatggaaaaactattaggtgaaaaaatcacaccagctaaatttacagatttaaacagaactggtttctggattaaaatccctggtaaatctggtggtatcaataatgaatatgctggtcaagtcgatgtaatgccaacaattttacatttggctggtatagatacgaagaactatttaatgttcggtactgatttattctctaaaggtcataatcaagtagttccattcagaaatggtgactttataacaaaagattataaatatgttaatggtaagatttattctaataaaaataatgaactcataactactcaaccagctgatttcgaaaagaataaaaagcaagttgaaaaggatctcgaaatgagtgacaacgtgcttaatggtgatttatttagattctacaaaaatccagacttcaaaaaggtaaatccttcgaagtataaatatgaaacaggacctaaagcaaactctaaaaaataatatttaaacacgaactcggattgataaaatatcaatccgggtttttattatgttcttttatattatgttttaaattatatgtattgataaaaaggtatattataaagatcattagcatagtcatcaaagccttatcaagttttatttatagttgaagcaacaatatattaaattatgacacttaacagtatcgatttcttttgatttcaaaaaggtgtataatgtatagaactgatttaagtacgtagagatttcaacagaagaaggaagatgggtatggaagcatataaaattgaacatttaaataaatcttatgccgataagattatattcgataatctagatttatcaatttcagaaggtgaaaaaataggtttagtaggcataaatggtacagggaaaagtacgttgttaaaagtaattggtggtattgatgatgattttacagccaatgttatgcatccaaatcaatatcgaattcgttattcgtctcagaaacaggatcttaatgaagatatgactgtttttgatgcagtattaagttctgatacaacaactttacgcatcatcaagcaatatgaacaggcagtacaagcttatgcagatgatcaaagtgataaattgttcaagcgaatgatggatgcgcaagatgctatggatcaacatgatgcttgggactataacgctgaaattaaaacgatcctctcaaaactaggtatacatgatactactaaatacattaaagaattatccggcggacaacaaaaacgtgttgtactagctaaagcattaatagaacaaccagatttattgttattagatgaacctacgaaccatttagacttcgaatcaatcagctggttgatcaattatgtgaagcaatatcctcatacagttttattcgtaacccatgatcgatattttttaaatgaagtttccactagaattattgaactaaacagaggtaagttagcgtcatatcctggtaactatgaatcttatattgaaatgcgcgctgaaagagaagtaacacttcaaaagcaacaacaaaagcaacgagctttatataaggaagaacttgcttggatgagggctggagctaaggcccgtactacaaagcaacaagctagaattaatcgatttaatgacctagaaaatgaagttaatcagcaatataaagacgataaaggtgaattgaatcttgcttattcaagattaggtaagcaagtgttcgaattagaagacttatcaaaggctattaacgataaagtattatttgaacatctgacggaaattattcaaaaaggtgagcgtattggtgttgttgggccaaatggagctggtaaaacaacactcttaaatattttgagtggagaagaccaacaattcgaaggtaaattgaagactgggcagacggttaaagtagcttattttaagcaaacagatgagaccctggatagagatattcgtatgattgattatttaagagaagaaagtgagatcgcaaaagaaaaagatggaacctcggtatctattacacaacttcttgaacgatttttatttccaagtgcaactcatggtaaaaaagtttataaattatctggtggagagcaaaagcgtttgtatttattacgtctactcgtacaccagccaaatgttctgttgttagatgaaccgacaaatgatttagatactgagactttaactatacttgaagattatattcatacttttggtggtacagtgattaccgtaagccatgatcgttacttcttaaataaagttgcacagtcatattggtttattcatgatggtcagatggaaaagattatcggaacttttgaagattatgaaagttataaaaaatcattagataaaaataaatccacattgaagcaacaatctaagtcttctacaactgtacgtaagaaaaatgggttatcatataaagaaaaattagaatatgaacaattgatgaaacgtatagaacaagcggaagtaagaatggaagaaattgatgtgctcatgattgaggcaagtgcagattatgggaaaattaaagaattaaacgaagaaaaagaacgacttgaaattcaatatgatatagacatcacaagatggagtgagttagaagaaattaaagaacaacaataaggggtcaatttatgatgcaacaaacattatcgcattactttgggtatgaaacgtttcgaccaggacaagaagagattattagcaaagtattagaccatcgtaatgtgcttggtgtcttaccaactggtggaggtaagtctatatgctatcaagtaccaggtttattgttaggtggtacaacaattgtaataagtccactaatatcattaatgaaagatcaagtggatcaattaaaagcgatgggaattcaagctgcttttttaaatagtagtttgactcaaaaagagcaacaacgtattgaaaaagcattatcaaatggagaaattcaatttttatatgttgcaccagaacgatttgaaaatcgatattttttaaatttgcttcaacgtatcaagattcatttagtggcgtttgatgaagcacattgtatttcaaaatggggtcatgatttcagaccgagttaccaaaacgtcatttctaaagtatttacgttacctcaagattttacaataatagcgttgacagcaactgcaacagttgaagtacagcaagatattagagaaaagttaaatatcgctcaaactgatcaaattaaaacgagtactaagcgtagaaacttaatttttaaagtaaatcctacttatcaacggcaaaaatttgtattagattatattaaaacacacgatgaagatgcaggtattatttattgttctacacgtaagcaagttgaagagcttcaagaagccttagaaagccagaaaattgatagtgttatatatcatgcaggtttgagcaataaagaaagagaagaagcgcagaatgacttcttatttgatcgtgttaaagtagtcgttgctacaaatgcttttggtatgggtattgataaatctaatgtacgttttgttattcattataatatgcctggagatttagaatcttattatcaagaagcgggacgtgcaggtcgtgacggattgaaaagtgaatgtattttgttatttagcgaacgcgatatcaatttacacgagtattttataacagtctctcaagctgatgatgactataaagataaaatgggcgaaaagttaactaaaatgattcaatatacaaaaacaaaaaaatgtttagaagcaacaattgtccattattttgaaccgaatgaaaaattagaagaatgtgaacaatgtagtaattgtgttcaacaagataaatcatataatatgacacaagaagctaagatgattattagttgcatcgctcgtatgaaacaacaagagagttatagtgttatcattcaagtattaagaggagagtcaacagattatattaagtataaaggttatgatcaaatttcaacccatggtttaatgaaaggttacactacatcagaattaagtcacttaatagatgaattaagattcaaagggttcttaaatgaaaatgatgaaatattaatgtgtgatacttcaattaaaaaattactcagtaatgaagtagaagtattcacaacaccatttaagcaaaaagcgactgaaaaagtatttataaatacggttgaaggggttgaccgagtattattcagtcagttggtagaagttcgtaaaaagttaagtgacaaattaacgatagcacctgtaagtatattttctgattacacgttggaggaatttgctaaacgtaagcctgcttcgaaacaagatatgattaatattgatggcgtaggtagttacaaattaaaacattattgtccagcatttttagaaacgattcaaaattataaagccaaagtatagtgaaggcacctagtaaacattccttgttttactgggtgttttttgaatttaaagtaaaataacactatttcttaactggagattacctattattcattattttgttaaaaaagttcaaggataaatcatttaaatttgaaaattgtaataaacgtggttaaatagggaatacatacatataatctcggttttatgctatgagaaaaaaagaggtggcaaagtgattaagtttaaaaatgtaactaagcgttatggcaaacatgttgctgtcgataacattagtttcaatattaatgagggtgaattttttgtgctaattggaccttcaggttgtggaaaaactacgacattaaaaatgattaatcgactcattcacttaagtgaaggttatatttattttaaagataaaccaataagtgattatccagtatacgaaatgcgttgggatattggatacgtattgcagcagattgcattattcccacatatgacaatcaaagaaaatattgcacaagtgccacaaatgaaaaagtggaaagaaaaagatatagataaaagagtagatgaattacttgatatggttggattagaacctgaaaaatataaaaacagaaaacctgatgaattgtcaggggggcaacgacaacgtgtaggagttatacgtgcgttagcagctgatccaccagttattttaatggatgaaccgtttagtgcattagacccaatcagccgagaaaaacttcaagatgatttaattgaattacaaactaaaattaagaagacaatcatatttgttacacatgatattcaagaggcgatgaaacttggtgataagatttgtcttttgaatgaaggtcatattgaacaaattgacacaccagaaggatttaaaaataatcctcaaagtgaatttgttaaacaatttatgggtagtcatttagaagatgatgcgccatgtgttgaagagaacccaattatccgtgacttggatattatgaaaccaatcgatgaggttacatctatgagcgcttatccaattgtttatgacgatcaacaaattgaagtattgtatcaacatttatcagagagcgagcgtgtcattgtcatgcaagaagatagcgtaggtcaatatgttattgaaaggaaagatatcttcaaatatttgtcccagaaaaaggaggtagctcaacatgactaactttttcgacatattgagtgaacgtaaggggcaactattttcgacaatgatagaacatattcaaatatcatttatcgcattattgattgcaactgctattgcggtaccattaggtattttattgacgaagactaaaacgatatctgaaatcgtaatgaatattgcggcaattcttcaaactataccatcgttggcattattaggtttaatgattcctttatttggtatcggtcgtgtgccagcaattattgcacttgtagtgtatgcattgttaccaattttaaggaatacgtatactggaattaaagaagttgatccatcgctcattgaagcggctaaaggtataggtatgaagccatttagacgtttaactaaagttgaacttccaatagcaatgcctgttataatggctggtgtaagaacggctatggtattaattataggtacagcaacactagcagcattaattggtgcaggcggactaggtgatttaattttattaggtatagaccgtaacaatgcatcattgatattattaggtgcaattccagcagccttattggcaattatatttgatttaattttaagatttatggctaaattatcttataaaaagttattgatgacgttaggtgttatagtgatgattattatactggccatcgctattcctatgtttgcacaaaaaggtgataaaattacgttagctggaaagcttggctccgagccttcgattattacaaatatgtataaaattttaatagaagaagagaccaaaaatactgtagaagtgaaagatggtatgggcaaaacagcatttttatttaatgctttaaaatctgacgatatagatgggtatttagagtttactggaacagttttaggtgagttaacaaaagaaccattgaagtcaaaagaagagaaaaaagtatatgatcaagctaagcaaagtcttgaaaagaaatatcaaatgactatgttaaaaccaatgaaatataacaatacgtatgctttagctgtaaaacgtgattttgctaaacaacataatatacgtacaattggtgatttaaataaggttaaagatcaacttaaaccaggatttacattggaatttaatgatcgtccagatggttacaaagctgttcaaaaggcttataatttaaatttagataacatacgtacaatggaacctaagttgagatatcaagcgatcaataaaggtaatattaatttaatagatgcatattcaactgacgctgaattaaaacaatatgatatggttgtgttaaaagatgataagcacgtatttccaccatatcaaggagcaccattatttaaagaaagctttttaaagaaacatccagaaattaagaaaccgttaaacaaactagaaaacaaaatatctgatgaagatatgcaaatgatgaactataaagtaacagttaaaaatgaagacccatatacagttgcgaaagattatttaaaagaaaaagggttaatcaaataacgaccaacgccacataagatgaggggcacaccattatatcttatgtggcgttgctatatttacatctatgtttatgttcaatttaaacatgcaataatgattaaaaaatatgacatgttaaacataatgaaagctagtatgatgtgaaaatagtagcattgcattttagaaacatagagcgatataatgaatataagttttttaaaatttcagttaattctaaggaggttgtttttattatgaaagaacaacttaatcaactatcagcatatcagcctggtttatctccaagggcattgaaagaaaagtatggcattgaaggagatttatataaacttgcatcaaatgaaaatttgtatggaccatcgcctaaagttaaagaagcgatatcagcacacttagatgagttatattattatcctgaaacaggatcaccgacattaaaagcggcgattagtaaacatttaaatgtagatcaatcacgcattttatttggtgcgggattagatgaagttatattaatgatttctagagcagtattaacgccaggggatactattgttacaagtgaagcgacattcggtcaatattatcacaatgcgattgttgaatcagctaatgtgatacaagtacctttaaaagatggtggcttcgatttagaaggtattttaaaagaagttaatgaagatacgtcattggtatggttatgtaatccaaataatcctacaggtacgtattttaatcatgagagcttagattcgtttttatctcaagtaccatcacatgttccggtactcatagatgaagcttattttgaatttgtgacagcagaggactacccggatacacttgctttgcaacaaaaatatgacaatgcattcttattacgtacattttcaaaggcgtatggattagcgggtttacgtgtaggatatgtggtagcaagcgaacatgcgattgaaaaatggaacatcattagacccccatttaatgtgacacgtatatctgaatacgcagcagttgcagcacttgaagatcaacaatatttaaaagaggtaacacataaaaatagtgttgaacgcgaaagattttatcaattacctcaaagtgagcatttcataccaagtcaaacgaattttatatttgtaaaaacaaagcgggtaaatgaactttatgaagcacttttaaatgtagggtgtattacgcgaccatttccaactggtgttagaattacaattggttttaaagaacaaaatgataaaatgttagaagttttatcaaactttaaatacgaatagtaagtgggcaccacatggtatgaatatgtgacaaaatgcagtgtgaatgatgaggtgagagcattcagtgtaaaaagcaacaatagatgatattgttttgtatcaattgcttttttgctatactgaattaatactgatattttgaggagaagattaaaatgacccgtaaatcaatcgcgattgatatggatgaagtattggcagatacattaggagaaatcattgatgctgtcaattttagagcggatttaggtattaaaatggaagctttgaatggtcaaaaacttaagcatgttattcctgaacatgatggattaattacagaagtattaagagaaccaggcttcttcagacaccttaaagtgatgccgtatgcacaagaagttgtaaaaaaattaactgaacattatgatgtatatattgctacagcagcaatggatgtaccaacatcattcagtgataaatatgaatggttactagagttctttccattcttagatcctcagcattttgttttttgtggtagaaaaaacatcgttaaagctgattatttaatagatgacaatcctagacaacttgaaatttttactggtacaccgattatgtttacagcagtgcataatattaatgatgatcgatttgaacgcgtaaatagctggaaagatgtagaacagtattttttagataatattgagaaataaaaatatatcacttgaagcatttcatgtagcaaataaaatgcatatactgtggccccaacacagagaattttgaaaagaaattctacaaacaatgcgagttggggtggccccaacataaagaaatattttttctttagaaattagtatttcttatgggagtgggacagaaatcaatgttctatgctctatgaagttatattggcagtagttgactgaacgaaaatgcgcttgtaacaagcttttttcaattctagtcaggggccccaacaaagagaatttcgaaaagaaattctacaaacaatgcaagttggggtgggacgacgaaataaattttgcgaaaatatcatttctgtcccactccctcctatttttaagtacacattagctgtgactaatgataaagaatcgctacataatcaatcattagtcgttctttatcatttccgtcccgctctcaataaatgttagtctatctcattattataaatcggatgaatgtgttaatctttggcagattacacgtcatccgattttttatagaatttgaaaaagacgcataaaccactatgatttaaaatacaacatcaatcattttagtggcatgcgccaaaattatatttctgtttttgaaacaggataatagcttaaagctcataacaacgaatattaggtacgttgaatcttattattacactttaaacctaatataatatcgcgttaatatcattctggatgcttacaaatcattgacagtaagcaactgaatggcatttggtataacctcaatatcaataggtgtttctaatgaaatttcgccatcaatatcaactttcattgctggatctgttgtaattgaaatctttttaccaggtatatgctcaataccttgagtaatttcattccaattcatgctatcacgctttttaaaaatatcatttaaaatactgaaactttgttcattaaaaatgaaagtgttcagttcaccatcttgaggagacaaatcagtcaatggtatacgactaccaccaatgaatggaccatttgctgatagtatcatggtcgtttcgccagaatatgtcttatcatcaattgataattgataattaaattgtgttggatttagcagtgttttgacagttgatccaatataactcaatttaccaaatatatcttttgaaccatcttgtacgttttcagcgttttgaacaattagacctaagccaacaaagttgagtgcatattgattatttattttaattacatcgtatgtaccaacttgtgcagaaatcatttgttcactagcttgtttatgattaggtgctatatttagcgtttttgtaaaatcattaaaagtaccgcctggtaaaatgccaatagggagttgaaggtcatacgtcataacaccatttataagttcgttaaccgtgccatcaccgccaagaataaataatatatctacatcttttgcataatctttagctttaatttcttggcaatatttaattatgtcaccttcgttttcactcaattgaatagaaagatgcttacaaattgaacttaatgccgttgtaacttccccgataccttgattaatattttttaatccactgtgttcatggtaaaagaggacaccatgtgtatatttattttccatagtttagcctactttctaaaaattggttcattaaatatatatacccacttttaattgttaataccaaaaatatgtttttaaatagagaaaatggtaataaatgaaattgatgtctatagagtgggacgagaaaatatagttattgctgtatataacgagcatattaagtttttatttatactgatatcttgcatttaattaatagaaaccaataaaaaaacagtaagccatttaaatgacttactgttttttgaattaggccaacaatattaacgaatacctttcattgctttaataattaaaggtgagaatgctaatacaattgttgtaacaataattgcaacaacacctaagaagataaagtaatttgtttgacctagtggttctattaacttaactaatgtaccattgattgcttgtgcagaagcgttagttaagtaccaaatactcatcatttgagcattaaatgctttaggtgctaacttaacagcagcactattacccgttggtgataagcaaagttcaccgataacacagataatgtacgataaaataacccagttaactgagaagtttgatgaacctgatgcataacctacaataccaattagtatgtatgaagcacctgctaagaacgtaccaattgcaaatttcactggcaggctaggttgtttagttccaagcttttgccataaaagtgaaataattggagctaataataaaataaataatgggttaattgattggaagatcgcttcaccaaagtttgttttccaaccaaataagtttaatttcatatctgaatgttcaattccataaatgtttaatacattagacccttgttcttgaatagcccagaaaaccattccaagaataaataatggaataaatgctttaacacgagaacgttcagtatcagtgacatctttacttctaataattaaagtgaagtaaatgattggtaatgcaatacctaatactaaaacagtattactaactaagttaaatgataatgagttagttaatgcaccaataacgataattaatacaattgctaagataacacttccgataataagaccatactttttcttttcagctggtgtcaatggattagtaggtttcataccaacgctacctaagtttttgcggttgaaaagtacataccatactaaacctaatgccataccaacagctgcaatcaagaatccgccgtgaaagtttttaacattaacaaagtgttgcaaaataataggtgataataatgcacccatattaactgacatatagaaaataacaaaacctgcatccatacgtctatcattttcaggatataaacggccaacgatatttgaaatgtttggcttcattaaacctgaaccaataatgatgaagaacattgatgtgaataagccgattaatgcaaatggtaagcttaaacaaatatgtccgataataataaagactgcacctaataaagtagcgcctctagtacctgtaattctgtcagcaatccatccgcctggtattgatgtcatatagattaatgaaccataaactgacataattgacatagctgttgttttatcaattccaaggccattatctgttacggcaaagtacatgtagaaaatgagtagggcacgcatgccataataactaaacctttcccagaactctacaaagaagagtacgcctagccctcgaggatgcccgaaaaatcctgtttgaggtatgtcttgaatttgatttccatgggagttttgttgtgtcatttatacatcccatcctttcttcccctaatacaatagtttaagtaaatttgattgtgccttatcaactaaatatttcacaaatcacaaaaaaataaaaatattgagaatattctgttattaagcgggcacaattaattagagataatataaaaatatacttattgacgttaaagtgcaataggtttctataaaaatgttgtttaattcgtgtactaatattcttttggtgtactttggtataaaatgttattttaatgtaacctattatgtatgctaaatgaaaaacacaccaataatgtaggaaaacctaattattggtgtgtttattaaatgatacatttaacgattatctattttttcgggatataagtcatgattcattaaacgatgttcagccatttgttcgtatttagaatttggacgtccatagtttgtataagggtcaatagaaattccaccacgtggtgtgaacttgccccaaacttcaatataatgtggatccataagctctatcaagtcattcataattatattcatacaatcttcatggaaatcaccgtgatttctgaaactaaataagtataatttcaaagattttgattcaaccattttaacatttggaatatatgaaatatagatagttgcaaaatctggttgcccagtaatcggacataatgatgtgaattctggacagttgaattttacgaaatagtcacgaccttgatgcttattatcaaacgattctaatacatcaggacgatagtcaaaattgtacgtattgtcttgatttcctaataaagttatatcttgtaattcatcttgttgacggccatgtgccataaaaagcgctcctttaaatttatttttttattactttggcgtctcggcgtgctttttcaaacatgtaataacttgcaccgataataacgacgtaacctaatgttgcatagaaatctggagattctccaaatagaataaatccaagtattgctgtgaaaattatagatgcatatgtgaaaatagaaatatctttcgcagcagcaaaactatatgccaatgtaacgccaatttgacccacagcggcagctaagccagcccctaataggtaaagtatttgcgtttgactcattggttcatatgtatatgcagtaaatggtattaatacgatgactgaaaataatgagaagtaaaatacaatggtgtatggtgcttctctagtactaagtgcgcgtacacaagtatatgccgatgcagcaaaaatacctgaaaatagtccagctagtgatggaatcatagatgatgaaaattcaggtttcactattaaaagcatacctaaaatagcaattatcattgctgttatttgatacttccttaccttttcatgtaagaaaacaatacttaataaaatcgtccagaaaggattgagtttcattagtgaatcagcatcgctaagtaccatatggtcaatggcgtaaatatttaataatacacctatgagtccaagtgttgatcgtgttaataataatggttggcttgagagtttaccaaacattggttgatgatatttatatataaaaaataatggaataaacattgctactaagtttcgtgctaatgatttttgaaaaacaggaagatcacctgcaagtctgaaaaacactgacataaaactgaaaccaatagccgaaattaaaatggcaatgataccttttactttaggattcaattttatcgcctcttttatataaaattaacgtatttatattagcataaaacaacatgttgtgcataaatagttgaaatttactataaaaagactataatagattttaccgaacaaatgttctgtgtttatttgtcggaataatagggcattacacttttatgaatgtttgtgttattacataaaacaaatatcaattcagtatcaagctaataagctttttcttgatttctgttgatacaattgagattgacacagattttaaaaaatcaagtgatatctactgaaaaaatttttttaatttgttcaagtttttctaattaagtattggtgcctagttggaacgttttacgaacattcgattagaaaatgacactttaaatcatagtgtgtcttatgtataatgaaacacataatatagtgttggttaaacgaaaaagacacaatatcttgtgttttgtatgcaaatgcattatttatgaagaaattacatttaaaagtaatttaacacagaaatttaatagttattatcaatgaatagtcatattttttagaaaatgtactgagcaaatggaagatatctaatgatctaaacactacatatagtgatttttatacattcaacccatataagctactattttctcaaatataaatctatgcaattggtttacatttgagaaaataagtagcttcattatagttaatacaatgctgagataaccatagtagcgacgttgttaaagcattttttaattgtaatgactacttaatttaaaagggttgaagaaagaaggtgatccaatgaaaataatatatttttcatttactggaaatgtccgtcgtttcattaagagaacagaacttgaaaatacgcttgagattacagcagaaaattgtatggaaccagttcatgaaccgtttattatcgttactggcactattggatttggagaagtaccagaacccgttcaatcttttttagaagttaatcatcaatacatcagaggtgtggcagctagcggtaatcgaaattggggactaaatttcgcaaaagcgggtcgcacgatatcagaagagtataatgtccctttattaatgaagtttgagttacatggaaaaaacaaagacgttattgaatttaagaacaaggtgggtaattttaatgaaaaccatggaagagaaaaagtacaatcatattgaattaaataatgaggtcactaaacgaagagaagatggattctttagtttagaaaaagaccaagaagctttagtagcttatttagaagaagtaaaagataaaacaatcttcttcgacactgaaatcgagcgtttacgttatttagtagacaacgatttttatttcaatgtgtttgatatttatagtgaagcggatctaattgaaatcactgattatgcaaaatcaatcccgtttaattttgcaagttatatgtcagctagtaagtttttcaaagattacgctttgaaaacaaatgataaaagtcaatatttagaagactataatcaacacgttgcaattgttgctttatacctagcaaatggtaataaagcacaagctaaacaatttatttcagctatggttgaacaaagatatcaaccagcgacaccaacatttttaaacgcaggtcgtgcgcgtcgtggtgagctagtgtcatgtttcttattagaagtggatgacagcttaaattcaattaactttattgattcaactgcaaaacaattaagtaaaattggtggcggcgtagcaattaacttatcaaaattgcgtgcacgcggtgaagcgattaaaggaattaaaggcgtagcgaaaggtgttttacctattgctaagtcacttgaaggtggctttagctatgcagatcaactaggtcaacgccctggtgctggtgctgtgtacttaaatatcttccattatgatgtagaagaatttttagatactaaaaaagtaaatgcggatgaagatttacgtttatctacaatatcaactggtttaattgttccatctaaattcttcgatttagctaaagaaggtaaagacttttatatgtttgcacctcatacagttaaagaagaatacggtgttacattagacgatattgatttagaaaaatattatgatgatatggttgcaaatccaaatgttgagaaaaagaaaaagaatgcacgtgaaatgttgaatttaattgcgcaaacacaattacaatcaggctatccatatttaatgtttaaagataatgctaatagagtgcatccgaattcaaatattggacaaattaagatgagtaacttatgtactgaaattttccaattacaagaaacttcaattattaacgactatggtattgaagacgaaattaaacgtgatatttcttgtaacttaggttcattaaacattgtaaatgtaatggaaagcggaaaattcagagattcagttcactctggtatggacgcattaactgttgtaagtgatgtagcaaacattcaaaatgcaccaggagttagaaaagctaacagtgaattacattcagttggtcttggtgtgatgaatttacatggttacttagcaaaaaataaaattggttatgagtcagaagaagcaaaagattttgcaaatatcttctttatgatgatgaatttctactcaatcgaacgttcaatggaaatcgctaaagaacgtggtatcaaatatcaagactttgaaaagtctgattatgctaatggcaaatatttcgagttctatacaactcaagaatttgaacctcaattcgaaaaagtacgtgaattatttgacggtatggctattcctacttctgaggattggaagaaactacaacaagatgttgaacaatatggtttatatcatgcatatagattagctattgctccaacacaaagtatttcttatgttcaaaatgctacaagttctgtaatgccaatcgttgaccaaattgaacgtcgtacttatggtaatgcggaaacattttaccctatgccattcttatcacctcaaacaatgtggtactacaaatctgcattcaatactgatcagatgaaattaatcgatttaattgcgacaattcaaacgcatattgaccaaggtatctcaacgatactttatgttaattctgaaatttctacacgtgagttagcaagattatatgtatatgcgcactataaaggattaaaatcactttactatactagaaataaattattaagtgtagaagaatgtacaagttgttctatctaataagtaaacgtaaaaaatgacaaacaactaatcatctcgtttaaaataacagatgattagtctgccatgtctatatttgtcaattattgagagtaacattacaggaggaaattatattcatgatagctgttaattggaacacacaagaagatatgacgaatatgttttggagacaaaatatatctcaaatgtgggttgaaacagaatttaaagtatcaaaagacattgcaagttggaagactttgtcagaagctgaacaagacacatttaaaaaagcattagctggtttaacaggcttagatacacatcaagcagatgatggtatgcctttagtcatgctacatacgactgacttaagaaaaaaagcagtttattcatttatggcgatgatggagcaaatacacgcgaaaagttattcgcatattttcacaacgctattaccatctagtgaaacaaactatttattagatgaatgggttttagaagagccacatttaaaatataaatcagataaaattgttgctaattaccacaaactttggggtaaagaagcttccatatatgaccaatatatggccagagttacgagtgtatttttagaaacattcttattcttctcaggtttctattatccgctatatctagctggtcaaggaaaaatgacgacatcaggtgaaatcattcgtaaaattcttttagatgaatctattcatggcgtatttaccggtttagatgcacagcatttacgaaatgaactttctgaaagtgagaagcaaaaagcagaccaagaaatgtataaattgctaaatgacttgtatttaaatgaagagtcatacacaaaaatgttatacgatgatcttggaatcactgaagatgtgttaaactatgttaaatataatggaaataaagcactttcaaacttaggctttgaaccttattttgaggaacgtgaatttaacccaatcattgagaatgccttagatacaacaactaaaaaccatgacttcttctcagtaaaaggtgatggttatgtattagcattaaacgtagaagcattacaagatgatgactttgtatttgacaacaaataataattaaaattaaaaagaccttcacatgaaaaggcaaagcgatgacattcgcttccgacatgttgaaggtcttttttctatgcttaaaaacgtatacatattttgaaaaagtaaaaatgacatttaatgatgtcaatgagtctagaaagtatacaagatattgcattacaaaagggtgtgctattttactatatacatctaaattacacagttacaaaaattgatttctattttaattgcaaatatcaataaaattgacaataaattatttgaaaggctattgaaatgagtgacaaaaaacgataccattaatgagaaatgttatcaatgataataattatcattaaattaaagggagaaaattttgtaatgaagtatttattaaagggaaaaattttgcttctattacttatattgctaacaatcatttcgttgtttataggtgtcagtgaactgtctattaaagatatctttcatttatcagactcacagcaaaatatattgttctcaagccgaataccgagaacgatgagtattttaattgctggaagttcattagctttagctggcctaatcatgcaacaaatgatgcaaaataagtttgttagtccaactacagctgggacgatggagtgggcaaaattaggtatcttaattgccttattattctttccaactggtcatattttattaaaactagtatttgctgttatttgcagcatcagcggaacatttttatttgttaaaattattgattttatcaaagtgaaagatgtcatctttgtaccactattagggattatgatgggtggcattgtcgctagttttacaacgtttatctcattacgtacaaacgcagttcaaagcattggtaactggcttaacgggaactttgccattatcacaagtggacgttatgaaatcttgtatttaagtattcctcttttagcattgacatatctttttgcaaatcatttcacaattgtaggaatgggtaaagactttaccaataatttaggtttgagttatgaaaaattaatcaatattgctctatttattactgccacaattacggcattagtcgtcgtgacagttggaactttacccttcttaggtttagttattccaaatattatttcgatttatagaggcgatcatttaaaaaatgcaattcctcatacgatgatgttaggtgccatctttgtattgttttctgatatagttggcagaattgtagtttatccatatgaaattaatattggtttaacaataggtgtatttggaacaatcattttccttatcttacttatgaaaggtaggaaaaattatgcgcaacaataataaaaaaataatgcttttaattgcagtcacgttcttaattagtatgctgtacttatttgttggtattgattttgaaatatttgaatatcaattttcaagtcgtttaagaaagttcatattaattattttagtaggtgctgccattgcaacatccgttgttattttccaagcgattacaaataatcgtttattgacaccatcaataatgggattagatgcagtttatttatttatcaaagtattgcccgtctttttatttggaattcaatcggtatgggttactaatgtatatttgaactttatattaacacttataacgatggtattattcgcactaatcctattccaaggtatctttaaaattggacatttttcaatttactttatcttacttataggtgtccttttaggaacattttttagaagtattacaggttttattcaattgattatggatcctgagtcatttttagcaatacaaagtagtatgtttgctaattttaatgcttctaattcgaatttagttactttttcagcagtattactagtaatcatattagtcattacaatttttctattgccatatttagatgtattgcttttaggtcgtgctgaagcaattaatctggggatatcgtatgaaaaattaacgcggattctacttgtaatagtttctgtcttagtctctgtgtcaactgcattagtaggaccaattacatttttaggcttattgactgtaaatctagcgcatgaactaatgaagacgtatgaacataaatatatattaatcgcgacaatttgcttgagttggattagtttatttagtgcgcaatggatagttgaaaatgtgtttgaggctacgacagaaatgagtatacttattgatttaattggtggaagttatttcatttatctattagttagaaggagaaatgcgcaatgattcaagttgggaatttaactaaaactataaataatcaaatgatattggacgatattagcatagaaattgaaaaaggtaagttgacttctttaattggacctaatggagcagggaagagtacgttactttcagcgatatgtcgcttaattcggtttgatgaaggggaagtaaaaatagatggacagcttatgtctgattataaaaacaatgatttgtcgaaaaagatatcgattttaaagcaaacaaaccatacagaaatgaacattactgtagaacaattagttaatttcggacgatttccatattctaaaggacgtttaacgaaagaagaccatgaaattgttaatgatgctttagatttgttgcaattacaagatattagaaagcgtaatataaaatcattgtctggtggacaacgtcaacgtgcctatatagcgatgaccattgcacaagatactgaatatattcttttagatgaaccgttaaataatttagatatgaagcatgctgttcaaattatgcaaacgttaaaaatgttagcgcataaaatgaataaagcgattgtcattgtgttacatgatattaactttgcgtcctgttattcagatcagattgtagcaatgaaaaacggacaactagttaaatcagatttgaaagataatgtcattcaaagtagtgttttaagtgatttatatgacatggatattcaaattgaacatataagaaatcaaaggatttgtttatattttaaggattgataatttggagacactttaaaggggtgatgcaccaattaaagaagggttaaacgtaaagcatttatttatatttcacatcaagcacacagattaagccaaaagaggagaatattatattatgaagaaaacagtcttatatttagtagtagcagtaatgtttttattagcggcatgcggtaacaattctgataaagaacaatcaaaatcagaaactaaaggttctaaagatacagtaaaaattgaaaacaactataaaatgcgtggcgagaaaaaagatggtagcgatgctaaaaaagttaaagaaactgttgaagtaccaaagaaccctaaaaatgcagttgtattagattatggtgcattagatgtaatgaaagaaatgggcttatcagacaaagtaaaagcattacctaaaggggaaggcggcaagtcattaccgaatttcttagagtcatttaaagatgacaagtatacaaatgttggtaacttgaaagaagttaatttcgataaaattgcagcaacaaaaccggaagtaatctttatctctggccgtacagcaaatcaaaagaatttagatgaatttaaaaaagctgcaccaaaagcaaaaattgtttacgttggtgcagatgaaaagaatttaattagttcaatgaaacaaaacactgaaaatatcggtaaaatttacgataaagaagataaagctaaagaattaaataaagatttagataacaaaattgcttcaatgaaagataaaactaagaagttcaacaaatcagttatgtatttattagttaatgaaggtgaattatctacttatggacctaaaggtcgtttcggtggattagtttacgatacattaggtttcaacgcggttgataaaaaagtaagtaacagtaaccacggacaaaatgtctctaatgaatacattaataaagaaaatccagatgttattttagcaatggatagaggacaggctgtaagtggtaaatcaactgcgaaacaagcattaaataatcctgtattaaaaaatgttaaagcaattaaagaagacaaagtttataatttagaccctaaattatggtattttgcagctggatcaactacaactacaattaaacaaattgatgaacttgaaaaagttgtaaaataattttaaaagaggggaacaatggttaaaggtcttaatcattgttcccctctttactttaaaaaaggaaatctgggacgtcaatcaatgtcctagactctaaaatgttctgttgtttgtcgttggttgaatgaacatgtacttgtaacaagttcatttcaataccagtgggctccaaacatagagaaatttgatttccaatttctactgacaatgcaagttgacggagcccaaacatagagaatatcaaaaagaaattctacagaagtggtgctttatcatgtctatcccactccctataattttttggctatgttgtttaaatttcgaaataaatatgatagtgatatttgcagcgattgttaaatcgagattggcaattaggacaacgctcaaccatcatatattcattgattgttaattcatgtttgcatacaccgcataagattgctttttcgttaaatgaaggctcagaccaacgcttaatggcgtgcttttcaaactcattatggcacttatagcatggatagtatttattacaacatttaaatttaattgcaataatatcttcttcggtaaaataatggcgacagcgtgtttcagtatcgattaatgaaccataaactattggcatagacaaagctccttaacttacgattcctttggatgttcaccaataatgcgaacttcacgatttaattcaatgccaaatttttctttgacggtcttttgtacgtaatgaataagattttcataatctgttgcagttccattgtctacatttaccataaaaccagcgtgtttagttgaaacttcaacaccgccaatacggtgaccttgcaaattagaatcttgtatcaatttacctgcaaaatgaccaggcggtctctggaatacactaccacatgaaggatactctaaaggttgtttagattctctacgttctgttaaatcatccattttagcttgtatttcagtcattttaccaggagctaaagtaaatgcagcttctaatacaactaagtgttctttttgaataatgctattacgataatctaattctaattcttttgttgtaaatttaattaacgagccttgttcgtttacgcaaagcgcatagtctatacaatctttaacttcgccaccataagcgccagcattcatatacactgcaccaccaattgaacctggaataccacatgcaaattcaaggccagtaagtgcataatcacgagcaacacgtgagacatcaataattgcagcgccgctaccggctataattgcatcatcagatacttcgatatgatctagtgataataaactaattacaatgccacgaataccaccttcacggataataatatttgagccattgcctaaatatgtaacaggaatctcattttgataggcatatttaacaactgcttgtacttcttcatttttagtaggggtaatataaaagtcggcattaccacctgtcttagtataagtgtatcgttttaaaggttcatcaactttaattttttcatttgggataagttgttgtaaagcttgatagatgtctttatttatcacttctcagtacatcctttctcatgtctttaatatcatatagtattataccaattttaaaattcatttgcgaaaattgaaaagaaagtattagaattagtataattataaaatacggcactattgtcgttataagtattttttacatagtttttcaaagtattgttgcttttgcatctcatattgtctaattgtaaagctatgttgcaatatttgatgctttttagtattgaattgtaaagcgatctcatcattagtcgataagagacgatcaagtgcaagataagattcaaatgtttgggtattcatttgaatgatatgtagacgcacctgttgttttagttcatgaaaattgttaaacttcgccatcataacctttttattatatttatgatgcaaacgataaaaccctacataatttaagcgtttttcatctaaggatgtaatatcatgcaaattttctacacctactaaaatatctaaaattggctctgttgaatatttaaaatgatgcgtaccgccaatatgttttgtatattttactgggctgtctaagaggttgaataataatgattcaatttcagtgtattgtgattgaaaacaattagttaaatcactattaatgaatggttgaacatttgaatacatgataaactcctttgatattgaaaattaatttaatcacgataaagtctggaatactataacataattcattttcataataaacatgtttttgtataatgaatctgttaaggagtgcaatcatgaaaaaaattgttattatcgctgttttagcgattttatttgtagtaataagtgcttgtggtaataaagaaaaagaggcacaacatcaatttactaagcaatttaaagatgttgagcaaaaacaaaaagaattacaacatgtcatggataatatacatttgaaagaaattgatcatctaagtaaaactgatacaactgataaaaatagtaaagaatttaaggcactacaggaagatgttaaaaaccatctcatacctaaatttgaagcatattataagtcagcaaaaaatttgcctgatgatacaatgaaagttaagaaattaaaaaaagaatatatgacgcttgcaaatgagaagaaggatgcaatatatcaattaaaaaaattcataggtttatgtaatcaatctatcaagtataacgaagacattttagattatacgaaacaatttgaaaaaaatagatacaaagttgaatcagaaattaaattagctgataataaaagtgaagcaactaatcttacgacaaaattagaacataataataaagcgttaagagatactgcgaaaaagaacctagatgatagtaaagaaaatgaagtaaaaggcgcgattaaaaatcacattatgccaatgattgaaaaacaaattaccgatattaaccaaactaatattagtgataagcatgttaataatgcaaggaaaaacgcaatagaaatgtattacagtctgcagaactattataatacacgtattgaaacaataaaggttagtgagaagttatcaaaagtcgatgtagataagttgccgaaaaagggtatagatataactcacggcgataaagcctttgaaaaaaagcttgaaaaattagaagaaaaataactataatcattttttaaagttaaaaattttgaatttatggttaacatgtcaacttactatgtgtataatggtaaacattgatattaactatatgtataaaaatgtcacgcagatgctatttaaatgtgataaatatttttagaggtgaatagagtggctataaagctaagttcaattgaccaatttgaacaggttattgaggaaaataaatatgtttttgtattaaaacatagtgaaacttgtccaatatcggcaaatgcgtacgatcaatttaataaatttttatatgaacgcgatatggacggttattatttgattgtccaacaagaacgcgatttgtcagattatattgctaaaaaaacgaacgttaaacatgaatcacctcaagcattttattttgtaaatggtgaaatggtttggaatcgagaccacggtgatattaatgtgtcgtctttagcacaagcagaagaataatgaaactatagggttggaacattttgccttacactactagacgtgaatagcacaacttaaattcgtgtgaatcagagtagtttggctataatgatgttctgaccttttattttatgtaacctttagaagcagttaagttagtacttttttacaaacatatgtataatgtattcgagtatttttattgaaaatattttggaaaacgacgaatccaataagaaagtttaaacatgatttgtaagttagtttaatagcaaatatatgctaaaccagaagaagcatactgttatttactggaataattaataatcatgtcatgttaaatgttcgcatataatcacgagataaaatctgaaatttaagattaatcttttatgaataaaaaacgtatcacaacaaataataaagtaaggtggtcaaggttatgaaagtattagtagctatggatgagtttcatggaattatttcgagttatcaagctaatagatatgttgaagaggcagttgcaagccaaattgaaactgcagatgtagttcaagtaccattgtttaatggaagacatgaattattagattctgtatttttatggcaatctgggcaaaagtatcgtataccagtacatgatgcagatatgaatgaagttgaaggtgtttacggacaaactgatacagggatgaccgttattgaggggaatttatttttaaaaggtaaaaaaccaattgttgaacgaacaagttatggtttaggagaaatgattaaacatgcattagataacgacgcaaaacatgttgtaatttcactaggtgggattgatagttttgatgctggtgcaggtatgttacaagcattaggtgctcaattctatgatgacgaagggcgtgtcgtagatatgagacaaggtgctggcgtaattaaatatattcgtcgtatggatatgtcgaacttacaccctaaaatggaaacagcaagaattcaagtaatgtcggatttttcaagtcgattatatggtaagcaaagtgaaatcatgcaaacttatgatgcgcatcagttgaatcataatcaagcagcagaaatcgataatttaatttggtattttagtgagttatttaaaagtgaattgaaaattgcaattggtccagttgaacgtggtggtgctggtggtggaattgcagcagtcttgaaaggactgtatcaagctgaaatattaaccagtcatgcattagtagaccaactaacgcatttagaaaatttagttgaacaagcggatttaattatttttggagaaggattaaatgaaaatgatcagttgctagaaacgacaacattgcgtattgcagactttgtcataaacatcaaaaggttgccattgcaatttgtgcaactgctgaaaagtttgatttatttgaatcacaaggggttacagcaatgtttaatacatttatcgatatgccggaaagttataccgactttaaaatggggttacaaattaggcattatactgttcagtctttaaaactgttgaaaacacattttaatgttgatgtttagtaaagaaggactaaattggtgatgttgtcatgatggttaataacatttatgatggttagcaaaacgaattagaagatcgaaagtatacttaaaataaaataacatgaaaaaatcacgctatcattgcactgaatgttagcgtgattttttatattaattaagcctgagttgaactagtatataatcgttggtttttagttattttcagcgatatcttctacaattccaatgattacttgcactgctttttccatgacatcaatggatgcatattcatatgggccatggaagttaccgcaacctgtaaagatgtttggagttggtaaccccataaatgataattgtgaaccatctgtaccaccacgaataggttcagtgtttgctggaatatctaatttagcaaagacacgtttaggtatatcaataatatgaggcaatggtaatattttttctgccatattgaaatattgatccgatatatcaactttaactggataattttcaaaatgggcattgatatcgtcacgtatttctaaaatacgtttcttacgcaattcgaattgttttttatcatgatcacgaataatgtattgcaaagttgctttttcaacagttccttcaaagttcattaagtgataaaagccttcatatccttctgttcgctccggaacttcactatcaggtagcaaactatcgaattgttcacctaaacgtattgcgtttaccattgcatttttagctgaaccaggatgaacattcacaccgtggcatgtaataaccgcttcagcagcgttaaagctttcatattgtaattctccatattgactaccatccatagtataagcaaaatcggcattgaagcggtcaacatcaaatttatgtggaccacgaccgatttcttcgtctggtgtaaatccaatgcgaatggtaccatgtttaatttctggatgtttttgtaaataacaaatagcttccataatttccacaatacccgctttatcgtctgcacctagtaacgatgtaccatcagttaccattaatgtatgaccaactaaactgttaagttctggaaatactttaggatctaagacacgtttagtattgcctagtttatatggcttgccatcatagttttcaataatttgcggtttaacatttgaagcattgaaatcaggtgatgtatcaacatgagccaaaaaaccaacagttgggacgtcaacatcgatgttactttctaatgtagcaaataagtagccattttcatctaaatcagttggcaatcctaattgttgtaattctttttctaataaatgtaacaaatcccattgcttttcagttgaaggtgttgttgtagattttggatcagattgcgtatcaattgtcgtatatcttgttaatctatctatcaattggttcttcattatattcgaccccttaaactctattattcatgttgtaagattttttatatgtcttacctttgattttaccatacagttgtttgatacgtgtgtataggtaatatagaatttcagaaactaatataccgaaagcaatcgcacctgaaatcagtgtaacttctaaaaatgtatttacagcacttgtataatcattcgatactaaaaaacgagtcgcttgataagctgcaccaccaggtactaatggtataatgccaggcactatgaatataattaccggtcgtttatatctgcgactcatagtatgactcattaagcctaaaattaagcttcccaaaaatgaagcgccaacttttccaaactctaaatctaccgttaattggtaaatcgtccatgcaatggcacctacaaatccacatgctactaagagacgtttgggtgcattgaaaatgatagagaaaagtactgttgatataaagctgattgtaaaatgaaataaataaaataacatgctttaacagtccttccttaaatgattaataaaacgattgcgacaccagcaccgattgcgaatgctgttaatgcagcttcaacaccacgagacatacctgcaagtaattcacccgctaataaatctcgaatggcattggtaattaatataccagggacaagtggcatgacactggctatagtaatgatatcttgattggttgcaatacctaatttagtaaatgtggctgcaatggatatgaccacagcggctgcaacaaactctgagaaaaatttaatttgtatatagcgttgcacaaagctgaatgttaaaaatgcggatccaccagcaatgactgcaatccaacaatctgatgcgacaccaccaaacatgaacaggaagaagccacatgcaatggcagcggcaaagaaattcgttaaaaaagaatattgtaatgatgcatgctgtaaatgaataaattcagatttagcttcatcaattgtgagttctttatttgatattttacgtgaaagactattcgttaaagcgattttctctaaatctgttgtacgctcttgtatacgaattaatcttgtacttgttcgatcgtttaatgaaaaaataattgcagttgaactgacaaaactatatgtattatgaagaccataactatgtgcgatacgattcattgtatcttcaactcgatatgtttcagcacctgattcaagtaaaattctacctgcaattaatacaacatcaatcactttgttttcatctataattgtgattgaatctggcatatcaattcacctccaatgatatgtgttatttatttgaacaattgaagtttacaacttgttgttgcaactttcaatagtgagactttgtgttagtatgatgaacttgtatggttcaaatttaaataagaaaaactgttaatctttgctattatactatgatttaataatagcaaaggattaacagttttgtcgttgttatagattgatgatagggttaaacattactttatttcgcccttgatttttggctacatgcaccatatcgtctgcatctttaaacactttacgctgtgattttggatcgtcatctgttaaataaccaacaccgatagacactgacaatttaataacttctttgtttggtaaatggaatgatgatttttcaacacccgaacgaatattttcagctaatttaacactttgatcaagtgaatagttgtgaatgacaactgagaactcttcgccaccatttctaaaaattttaaattgattcggcacatagtttttaagtaattgagacatttgttttaatacagcatcacctgatttgtgtgagtaggtatcattgacatctttaaatccatcgatatcgattaataataatgcgatactttgatgttctttttcagcttttcgtgaaatttcatttaaatgtctatcaaattcttttacattacctaagcctgttaagtaatcatatttatcttcgttttcataacgatttacgagtgagaagaaatgccaaatatcgacaaatgttatcgctgaagctaaagtgataattaatgaaattggtattaaaatgataacttccgatagtgtgtaaataggactcactaatgcgacaccaaataaaatgattattgtaacaacattaagtattaataatgatagcacatcattttgttttaaaaatggtccaatagcacttgttactgcggcaataacaatcaacgtaacaccgtacataatcgagttgttaaatactacaatttcaacaattgctacaattactgtggcagataatgtatagaccatatttgtaaatctacctaaaaacaataaaggaacgaatgttaagtgaattaaataatcttcacgataagggatagggtagacagataataataatgatacgattgtcattaatacagtgacatatgccttagaaaaaaccatacgtttgttttctgaatactgtaagcgatggaataaatagattccagcgactataacagatatattgtatataaatgcttcgaacatgtctgaatcgactcctttaattgaccactagctattgtaagtgaaaacttacaatttgtcattagtttacatataaaattaatgtatgatatagactttgatgttaaaatgttgccttaaatgatatgatgaaaaaatgaataataggcgatatataagaaatgaatcgtatagttgtaaatatgatatcattgattgagcgaattaatttataataaagctataagatatacgtagaaaatagatatatcattctataaagacaatattaaataaatataacgttaaaaacaattaatatcgatgaaggtgaataaatggttacattattactagttgcagtaacaatgattgtcagtttgacgataacaccaattgttattgcaatatcgaaaagattaaatttagttgataaaccaaattttagaaaagtacacactaaacctatttcagttatgggtggtacggtgattctcttttcatttttaataggtatttggattggtcatcctattgaaacagaaatcaaaccacttattattggtgcgattattatgtacgtacttgggcttgtagatgatatctacgatttgaaaccgtatataaaattggctggtcaaattgctgctgccttagtagttgctttttatggtgtgactattgattttatttcgttgccaatgggtacaactattcattttggatttcttagtattccaattactgtgatttggattgttgctattacaaatgcaattaacttaattgatggactcgatggtttggcatcgggtgtttctgcaatcggactcattacaataggattcattgcaattttacaagctaatattttcataacgatgatttgttgtgttttattaggctctttaattgggtttttattttacaatttccatcctgccaaaatatttttaggtgatagtggggctttaatgattggatttatcatcggattcctttctttactcggattcaaaaatattacaattattgcattgttcttcccaattgttatcctagcagttccattcattgatactttgttcgcaatgattcgacgtgtgaaaaaagggcagcatataatgcaagctgataaatcgcatttgcatcataaactattagctttaggctacacacatagacaaacagtattattaatctattcaatctctattttatttagtctttcgagcattatcttgtatgtatcgccaccattaggtgttgtattaatgtttgtattaatcatatttagcattgaattaattgttgaatttacaggattaatagataacaactaccgaccaatattaaatttaattagtcgtaagtcatctcataaagaagattagattttaaaacggtaagtaataaaataaaaaatgatgtctgtacttttatgttgttataaagaaggcatactcacaaaaaacactagcatggaacgtgctttccaaattgcaaagtaacaatacgcaattagagttagccatcctaagctagtgctttttatttttattcagttggtatatcgaaaggtaactgctttggagtttcttcagtcaaatcgaaatttccagcagtcatttgatttaaaaagttaataaacgcttcatagtcacttttaacgacatcgatatagtagcttaccttatcagtgtaagtttggtttcttaacataaaatgagttgaagctaattcatattcaaatttaccagtttgatcataattcagtgttactatacatggtactgcttctcgtagttcgacacgtccgacatcataaatgacgtctctaacagcaccgctataggcgcgaattaaaccgccaccacctaatttaataccaccaaaatatcttgttactacgacacacgcattatgaacatcgagcttttttaatatgtctaacattggaacaccggcagttcctgtcggttcaccatcatcattcgctttttgaatattcatttcaggtccaatagtatatgcagaacaattatgagtggcatctttatgttctttttttattgcagcaataaatgctttagcttcatcttcattttgaacaggtttgatatgagcaatgaatcttgatttactaatcacattttcaataatgtgttcttttttaacagtaatgatattttgtgtcataataactccttaattcataagcttaagattatttaatcttcattatacactgaaaatgatatgactataaatcgtttgattgccattttctttttaactgaaatattgtatcattgcaatgagtatattttaggaggacgactatgaaaattgctgtgatgaccgattctacaagttatctgtcgcaggacttaatcgataaatataatattcaaatagcgccattaagtgtgacttttgatgatgggaagaactttacagaaagtaatgaaatagcaattgaagaattttataataaaatggcatcgtctcaaacgattccaacaacaagccaaccagcaattggcgaatggattactaaatatgaaatgctaagagatcagggttacacagatatcattgtcatttgcttatcaagtggaattagtggaagttatcaatctagttatcaagcaggggaaatggttgaaggtgttaatgtacatgcatttgatagtaaacttgcagcaatgattgaaggatgttatgtattacgtgctattgaaatggttgaagaaggatacgaaccacagcaaattattgatgatttaactaatatgcgtgaacacacaggtgcatatttaattgttgatgatttaaagaatttacaaaaaagtggtcgaattactggtgctcaagcatgggttggaacattattgaaaatgaagccagttcttaagtttgaagatggcaagattataccagaagaaaaagttcgtactaaaaagcgtgccattcaaacattagaaaagaaagtattagatattgtaaaagactttgaagaagtaactttatttgtcataaatggagatcatttagaagatggtcaagcgttatacaaaaaattacaagaagattgtccttcagcttatcaagtagcatactctgagtttggtccagttgttgcagcacatttaggttctggtggattaggtttaggctatgttggcagaaaaataagattaacataattataaaattttaataaaagagtctatattgtaattggaaattatctctcgtatacatggctttaaatgttcatcatttgaaagtcaaaatactaaagatataagaaaatcattataatattaggctcttttttacgttgaaatgaggttttaagcattaaacattacgggaaattaattcatcctcatacttcacttactaatgaaaaaattaaaaaagaagtaacaggtgtcatcaaacaaaagtcaaactattattgtgttcaatgtgaaagtacaaatccaaagcatttttatcagtatgattcctcagtacattccaagaaaattgtatattgcagaaattgtatatcactgggtcgaatggataatgtaacaagatataaaataacagaaagttcgcaaagttcatcacaagcatattatcatctctcatttgaattgtcggaacaacagtcttatgcctcagaacatattgttcgagccattagaatgagacaaacgattttgttatatgcagtaacaggagcaggtaagacagaaatgatgttccaaggcattcaatatgcaagacgacagggagataatatagctattgtgtcaccacgtgtagatgttgttgtagaaattagtaaacgtattaaagacgcatttcttaatgaagatatagacatactacaccagcaatcaagtcaacaatttgaagggcattttgttgtatgcacagtgcatcaactttaccgattcaaacagcactttgatactatttttattgatgaagtcgatgcctttcctttatcaatggataaaagtttacaacaagcattgaagtcatcttctaaaattgaacatgcaacgatttatatgacagcaacaccaccgaaacaacttctgtcagagattccccacgaaaatataattaaattgccagctcgctttcataaaaaatcacttccagttcctaaatatcgctatttcaaacttaataataataagattcagaaaatgttatatcgaattttacaagatcaaattaataatcaacgttatacactggtgttttttaacaatatagaaacaatgattaaaacattttcggtttataagcagaaaattactaaattaacatatgtccatagcgaggatgtttttcgctttgaaaaagttgaacaattaaggaatggacaattcgatgtcatttttactacgacaatattagaacgtggatttacaatggcaaatttagatgttgttgttatcgatgcacatcaatatactcaagaggctttaatacaaattgctggacgtgttggacgaaaattagaatgtcctactggaaaagtattgttttttcatgaaggtgtaagtatgaatatgattcaagctaaaaaagagattcaaaagatgaacaaattagcattaaaaagaggttggattgatgaataattgtttgagttgtggtgctgagttatatgaaaagataaccatttataatttgttcaagaaacctaatagattatgtgacagatgcaaagagaattgggacaatattaaacttgatattaaagcaaggcgatgttcaaggtgcttaaaatacttaaatcaaaatgaagcgtattgtttagactgcaagtttctatcggcacactttaatttaatggaacaattatattgtcaatttcaatatgacggtataatgaaagagatgatacatcagtataaattttcgaaagactattatttatgtgaattattggcacatttgattgaaataccacaaacatcttatgactatattgtgccaattccttcttcgccggcacatgatttatctagaacatttaacccggtagaagcagtactaaaagctaaagggattctctttgataagattttaaagatgtcaaatagaccaaaacagtctcatttaactaagaaagagcgtctggcagatgaaaatccatttattattgatatggaattagatttaaacggaaaggaaatattactcgttgacgatatttatacaactggattaacaattcatcgtgcagggtgtaaattatatgctaaaaatatcagaaaattcaaagtgtttgcgtttgcacgatagcgtaaaaatgttaaaatataataaagagttaccaataaagaggtttaaggagagattactatgattagatttgaaattcatggagataacctcactatcacagatgctattcgcaactatattgaggaaaaaattggtaagttggaacgttattttaatgacgtaccaaatgcagtggcgcatgttaaagttaaaacttattcaaattcagctactaaaattgaagtaacaattccattgaaaaatgttacgttaagagctgaagagcgaaacgatgatttatacgcaggtattgatttaattaataataaacttgaaagacaagttcgaaaatataaaacacgtattaatcgtaagagccgtgatcgaggagatcaagaagtgtttgttgccgaattacaagaaatgcaagaaacacaagttgataatgacgcttacgatgataacgagatagaaattattcgttcaaaagaattcagcttaaaaccaatggattcagaagaagcggtattacaaatgaatctattaggtcatgacttctttgtattcacagacagagaaactgatggaacaagtatcgtttaccgccgtaaagacggtaaatatggcttgattcaaactagtgaacaataaattaagtttaaagcacttgtgtttttgcacaagtgcttttttatactccaaaagcaatttctaactatttcatagttcgataatgtaatttgttgaatgaaacatagtgactatgctaatgttaatggatgtatatatttgaatgttaagttaataatagtatgtcagtctattgtatagtccgagtcgaaaatcgtaaaatatttataatataatttattagaaagtataattgcgtattgagaatatatttattaaggataaacttgttgacaacagaatgtgaatgaagtatgtcataaatatatttatattgattctacaaatgagtaaataagtataattttctaactataaatgataagatatattgttgtaggccaaacagttttttagctaaaggagcgaacgaaatgggatttttatcaaaaattcttgatggcaataataaagaaattaaacagttaggtaaacttgctgataaagtaatcgctttagaagaaaaaacggcaattttaactgatgaagaaattcgtaataaaacgaaacaattccaaactgaattagctgacattgacaatgtcaaaaagcaaaatgattatttagataaaattttaccagaagcatatgcacttgttagggaaggctctaaacgtgtattcaatatgactccatataaagttcaaattatgggtggtattgcaattcataaaggtgatatcgctgagatgagaacaggtgaaggtaaaacgttaacagcgacaatgccaacatacttaaatgcattagctggtagaggtgttcacgttattacagtcaatgaatacttatcaagtgttcaaagtgaagaaatggctgagttatataacttcttaggtttgactgtcggattaaacttaaacagtaagacgactgaagaaaaacgtgaagcatatgcgcaagacattacttacagtactaacaatgagttaggttttgactatttaagagataacatggtgaattattctgaagatagggtaatgcgtccattacatttcgcaatcattgatgaggttgactcaattttaattgatgaggcacgtacgccattaattatttctggtgaagctgaaaagtcaacgtcactttatacacaagcaaatgtttttgcgaaaatgttaaaacaggacgaagattataaatatgatgaaaaaacaaaagcagtacatttaacagaacaaggtgccgataaagctgaacgtatgttcaaagttgaaaacttatatgatgtacaaaatgttgatgttattagtcatatcaacacagctttacgtgcgcacgttacattacaacgtgacgtagactatatggttgttgatggcgaagtattaattgtcgatcaatttacaggacgtacaatgccaggccgtcgtttctctgaaggtttacaccaagctattgaagcgaaagaaggcgttcaaattcaaaatgaatctaaaactatggcgtctattacattccaaaactatttcagaatgtacaataaacttgcgggtatgaccggtacagctaaaaccgaagaagaagaatttagaaatatttataacatgacagtaactcaaattccgacaaataaacctgtgcaacgtaatgataagtctgatttaatctacattagccaaaaaggtaaatttgatgcagtagtagaagatgttgttgaaaaacacaaggcaggacaaccagtgctattaggtactgttgcagttgagacttctgaatatatttcaaatttacttaaaaaacgtggtatccgtcatgatgtgttaaatgcgaaaaatcatgaacgtgaagctgaaattgttgcaggcgctggacaaaaaggtgccgttactattgccactaacatggctggtcgtggtacagatattaaattaggtgaaggtgtagaggaattaggcggtttagcagtaataggtacagagcgacatgaatctcgtcgtattgatgaccagttacgtggtcgttctggacgtcaaggtgataaaggggatagtcgcttctatttatcattacaagatgaattaatgattcgttttggttctgaacgtttacagaaaatgatgagccgactaggtttagatgactctacaccaattgaatcaaaaatggtatcaagagctgtagaatcagcacaaaaacgtgtagaaggtaataacttcgacgcgcgtaaacgtatcttagaatacgatgaagtattacgtaaacaacgtgaaattatctataacgaaagaaatagtattattgatgaagaagacagctctcaagttgtagatgcaatgctacgttcaacgttacaacgtagtatcaattactatattaatacggcagatgacgagcctgaatatcaaccattcatcgactacattaatgacattttcttacaagaaggtgacattacagaggatgatatcaaaggtaaagatgctgaagatattttcgaagtcgtttgggctaagattgaagcagcatatcaaagtcaaaaagatatcttagaagaacaaatgaatgagtttgagcgtatgattttacttcgttctattgatagccattggactgatcatatcgacacaatggatcaattacgtcaaggtattcacttacgttcttatgcacaacaaaatccattacgtgactatcaaaatgaaggtcatgaattatttgatatcatgatgcaaaatatcgaagaagatacttgtaaattcattttaaaatctgtagtacaagttgaagataatattgaacgtgaaaaaacaacagattttggtgaagcgaagcacgtttcagctgaagatggtaaagaaaaagtgaaaccaaaaccaatcgttaaaggcgatcaagtaggtcgtaacgatgattgtccatgtggtagtggtaaaaaattcaaaaattgccatggaaaataaatgatataaaataactccttccaattaaacacctatagtttgtgttatgggaggagtctttttattttacaagcattaaatactttaaaaaatgtgaagaagttgttaaacgttgttatgtacttagttttaaaaaaataggtttaggcatttgtcgatgataaatgtactgatttttaacaataaatgcataaactaattgtcagtgtgcttatattttttaacattgttatttaacaaaattatgttaaaatttagcattataaaagatacaaatcaatgacttgaattgaattataaataggagcgaaggctatggaattatcagaaatcaaacgaaatatagataagtataatcaagatttaacacaaattagggggtctctttgacttagagaacaaagaaactaatattcaagaatatgaggaaatgatggcagaacctaatttttgggataaccaaacgaaagcgcaagatattatagataaaaataatgcgttaaaagcaatagttaatggttataaaacactacaagcagaagtagatgacatggatgctacttgggatttattacaagaagaatttgatgaagaaatgaaagaagacctagagcaagaggtcattaattttaaggctaaagtggatgaatacgaattgcaattattattagatggacctcacgatgccaataacgcaattctagagttacatcctggtgcaggtggcacggaatctcaagattgggctaatatgctatttagaatgtatcaacgttattgtgagaagaaaggttttaaagttgaaactgttgattatttacctggagatgaagcagggattaaaagtgtaacattgctcatcaaagggcataatgcttatggttatttaaaagctgaaaaaggtgtacaccgactagtacgaatttctccatttgattcatcaggacgtcgtcatacatcatttgcatcatgtgacgtgattccagattttaataatgatgaaatagagattgaaatcaatccggatgatattacagttgatacattcagagcttctggtgcaggtggtcagcatattaacaaaactgaatcggcaatacgaattacccaccacccctcaggtatagttgttaataaccaaaatgaacgttctcaaattaaaaaccgcgaagcagctatgaaaatgttaaaatctaaattatatcaattaaaattggaagagcaggcacgtgaaatggctgaaattcgtggcgaacaaaaagaaatcggatggggaagccaaattagatcatatgttttccatccatactcaatggtgaaagatcatcgtacgaacgaagaaacaggtaaggttgatgcagtgatggatggagacattggaccatttatcgaatcatatttaagacagacaatgtcgcacgattaatatatattttaagggagtgggacagaaatgatattttcgaaaaatttatttcgtcgtcccaccccaacttgcattgtctgtagaaattgggaatccaatttctctttgttggggccccgccggcaaggatgactagaattgaaaaaagtttgttacaagcgtattttcgttcagtcaactactgccaatataactttgtagagcattgaacattgatttatgtctcaggcttttttgttttcttaaaggtagctaaataaattgtaaattagattttggaatatgatttgtttatgaatatttaagtacaattcggtggtttttgacgaaatattatcctttataaaagtttcgtttgttaaacaaatctatgtactgtgcattaagtaatattaccttcaacgaatttcaatgtattgaattaaatgttgaaaacgttgtcaatcatttgcagtgaatacattttacaccgagtaggtagtttgcattcttttttatattgttaaccatttgattacatcgttataacaatagcttttgacaaaatgtattgtgctatagtatttgcatacttaaaatactaacagcaaaggaatgacagcaagatgaaaaaatctcttacagtgacggtttcgtcagtgttagcttttttagctttaaataatgcagcacatgcacaacaacatggcacacaagtaaaaacacctgttcaacataattatgtatcaaatgttcaagcacaaacgcaatcaccgacaacttatacagtagttgctggcgattcattatataagattgctttagagcatcacttaacgttgaatcaattatattcatacaatcctggtgtaacacctttaatttttcctggtgacgtgatttcacttgtgcctcaaaataaagtgaaacaaactaaaacggttaaatcaccagtaagaaaagcaagccaagctaaaaaggtagtaaaacaacctgtacaacaagcgtctaaaaaagtagtagttaagcaagcacctaagcaaacagtagctaagacagttaatgtagcatacaaacctgctcaagtacaaaaatcagtaccaactgtacctgttgcacataactacaataaatcagttgctaacagaggaaacttatatgcttatggaaactgcacatattatgctttcgatcgtcgtgcacaattaggtagaagtataggaagtttatggggcaatgcaaataactggaattacgcagcaaaagttgcaggatttaaagtagataaaacaccagaagttggcgctattttccaaacagctgctggaccatatggacatgttggtgttgttgaatctgtaaatcctaatggaacaattactgtttcggaaatgaactatgctggatttaatgttaaatcttcaagaacaattttaaatccaggaaaatataattacatccactaagtaacatatcaagacaagactatcctcttagcctgtttaagtaacaggttgagaggattttttggtatcatctaatcagacttatataaagaagatatttaaatgatatttaattgaatgatatgtaaaaagaaagtataatttatgattaattaatggaggaggtaattgaaatgggtgtacatcaatattttaaaagattatcagatatggaaagacttataagattacctggaaaatttaaatattttgaacacaatgttgcagcgcactcctttaaagtaactaaaattgctcaatatctagcaacagttgaagaatatcatggacgaaagattaattggaaaagcttatatgaaaaagcattaaatcatgatttcgctgaagtgtttactggtgatataaaaacacctgttaaatatgcgagtagtgaattaaaaaaattattttcgcaagttgaagaagaaatggtagagacctttattgaagaagaaattccattacaatatagagatgtttataagcaacgactgcaagaaggtaaagatgattcattagaaggccaaatactttcagttgctgataaaattgatttgctttatgaaacatttggagaaatacaaaaacgtaatcccgaagaattatttttcgaaatttatgaaatgagtctagaaacaattattcaatttgaccatttagcatctgtacaagattttattaataatatcattccagaaatgttgactgaaaactttatacctagaacagaattaagggaaacaaccatgaacattttaaataaaagaaaagaggaaaatgaatgatatggtattttagtgcagcattctttccatgtgtcttggtagtattgtttagtgtaataacaagaagtaaatgggtcggtactattctgacattaattttaattggtgcctcaatctataaagagtatttccataacgagtggattatttttattgatgtagtgtcattattagctggttatttaattatagatcaactcgaatttcataaacatcaagatgaagatcgctaagattaactttaaaataatgtttcaaacaaatttgttgaaacaaaatgatgattaatataatgtgtatttacatactaaaaataacaagataaacgatttgatttaaggcaagcatagttagcacaactatgtttgtttttctttgttcgacatttttacgaacaaacgtttgctttttgtgtgactactttgctaaaatatgtaatgagaaatcgaagagttgagcggaaatataaataatacattgaaagaggaggcatatgtgacaatggttgaacattatccttttaaaatacattctgattttgagcctcaaggtgaccaaccgcaagcaattaaggaaatcgtggaaggtattaaagcggggaaaagacatcaaactttattaggtgcaactggcacagggaaaacatttacgatgagtaatgttattaaagaagttggaaaaccaacattaattatcgcgcataacaaaacattagcaggacaattatatagtgagtttaaagaattttttcctgaaaacagggtggaatactttgtaagttactatgattattatcaacctgaggcatacgtaccgtctactgacacttttattgaaaaagatgcctcaatcaatgatgaaattgatcaactacgacattctgctacaagtgcattatttgaacgcgatgatgtaattattattgctagtgtaagttgtatatatggtttaggtaatcctgaagaatataaagatttagtagtaagtgttcgagttggtatggaaatggatagaagcgaattacttagaaaacttgtagatgtgcaatatacacgaaatgacatcgatttccaacgaggaacgtttcgagtgcgtggtgatgtagttgaaatattcccagcctctaaagaagaactttgtataagggttgagtttttcggtgatgagattgaccgaattcgagaagttaactacctaacaggtgaagtgttgaaagaaagagaacattttgcgatattcccagcttctcacttcgtaacacgtgaagaaaagttgaaagttgcgattgaacgtattgaaaaagaattggaagaacgattgaaagaattacgagatgagaataaattactagaagcgcaaaggttagaacagcgtaccaactatgatttagaaatgatgcgagagatgggattctgttcaggaattgaaaactattccgtacatttaactttgcgaccactgggttcgacaccatatactttattggattactttggcgatgattggttagtaatgattgatgaatcacatgtgacattaccgcaagttcgaggcatgtataacggagacagagcgcgtaaacaagttttggtggatcatggatttagattgccgagtgcattagataaccgtccacttaaatttgaagaatttgaagaaaagacaaaacaacttgtgtatgtatctgcaacgcctggaccatacgaaattgaacatacggataagatggttgaacaaattattcgtcctactggtttactggatcctaagattgaggttagacctactgaaaatcaaattgacgatttattaagtgaaattcaaacaagggttgagcgtaatgaacgcgtacttgttacaacgctcactaaaaagatgagtgaagatttaaccacatacatgaaagaagcgggtattaaagttaattatctgcattcagaaatcaagacattagaacgaatcgaaataattagagacttacgaatgggtacatatgatgttatcgtaggtattaatttattaagagagggtattgatataccagaagtttctctagttgtcatattagatgcagataaagaaggatttttacgttctaaccgctcattaattcaaacaataggtagagctgcgcgtaacgataaaggtgaagtcattatgtatgccgataaaatgactgattcgatgaagtatgcaattgatgagacacaacgtcgtcgagaaatacagatgaaacataatgaaaaacatggtattacacctaaaacaattaataaaaaaatacatgatttaattagtgctactgttgaaaatgacgaaaataatgacaaagcacaaactgtgatacctaagaagatgacgaaaaaagaacgtcaaaagacaatcgacaatatagaaaaagaaatgaaacaagcagcgaaagatttagatttcgagaaagctacagaattaagagatatgttatttgaattaaaagcagaagggtgacaagtaaatgaaagaaccatccatagtagtaaaaggtgctcgtgcgcataacttgaaagatattgatatcgaactacctaaaaataaattaattgttatgacaggattatctgggtcaggtaaatcgtcattagcattcgatactatatatgctgaaggacaacgtcgttatgttgaatcattaagtgcctatgcgcgtcaatttttaggtcaaatggacaaaccagatgttgatacaattgaaggattatcgccagcaatttcaatagatcaaaaaacaacaagcaaaaatccaaggtcaactgttgcaacagtaacagaaatatatgattatatacgtttgttatatgcacgtgttggtaaaccttactgtccaaatcacaatatagaaattgaatcgcaaacagtacaacaaatggttgaccgcattatggaattagaggcacgtacaaagattcaattattagcacctgtcatcgctcatcgtaaaggtagtcatgaaaagctaatcgaagatattggtaaaaaaggttatgtacgtttaagaatcgatggcgaaattgttgatgtaaatgatgtacctacattagataagaacaagaatcatacaatagaagttgttgtagaccgattagttgttaaagatggaattgaaacacgactagctgactctatagaaactgcgttagagctttcagaaggacaattaacagtcgatgtcattgacggggaagaccttaagttttcagaaagccacgcttgtcctatatgtggattttcaatcggagagttagaaccaagaatgtttagctttaacagtccttttggtgcttgtccaacttgtgatggcttaggtcaaaagttaacagtcgatgtagacttggttgttccagacaaagataagacgctaaacgaaggtgcaatagaaccatggataccgacgagttctgatttttatccaacattgttaaaacgtgtttgtgaagtttataaaatcaatatggataaaccttttaaaaagttaacagaacgtcaacgtgatattttattgtatggttcgggtgacaaagaaattgaatttacatttacacaacgtcaaggtggtactagaaaacgaacaatggttttcgagggggtagttcctaatataagtagacgattccatgaatctccttcagaatatacacgtgaaatgatgagtaaatatatgaccgaactaccttgcgaaacttgtcatggaaagcgattgagtcgtgaagcgttatctgtttatgtaggtggtttaaatattggtgaagtagtcgaatactcaattagtcaagcgctgaactattataaaaacattaatttgtcagaacaagatcaagcgattgcaaatcaaatattgaaagagattatttcccgactcgcttttttaaataatgtgggacttgaatatttaacactaaacagagcttcaggtacactttcaggtggtgaagcacaacgtattcgattggcaacgcaaattgggtcgcgtttgactggtgtcttatatgtattagatgagccatcaattggactgcatcaaagagataatgatcgattaattaatacacttaaagaaatgagagatttaggaaatactttaattgtagttgaacacgatgatgatacaatgcgtgcggctgattacttagtggacatagggcctggtgctggtgagcatggaggacagattgtgtctagtggtacacctcaaaaggtaatgaaagataaaaaatctttaacaggacaatacttgagtggtaagaaacgtattgaagtacctgaatatcgcagaccggcttcagatcgtaaaatttctatacgtggagctagaagtaacaaccttaaaggggttgatgtggacataccactatcaatcatgacggtcgttacaggtgtatcaggttcaggtaaaagctcattagtaaatgaagtattatacaaatcattagctcaaaaaatcaataaatctaaagtaaagccaggattgtacgataagattgaaggtattgatcaacttgataaaattattgatattgatcaatcaccgataggtagaacgccacgctctaatccagcaacgtatactggtgtgtttgatgatatacgtgatgtgtttgcgcaaacaaatgaagctaaaattcgaggatatcaaaaaggccgttttagttttaatgtaaaaggtggacgctgtgaagcttgtaaaggtgacggtattattaaaattgaaatgcattttttacctgatgtttatgttccttgtgaagtgtgtgatggtaaacgatataatcgtgagacactagaggttacttacaaaggtaaaaatattgctgacattttagaaatgactgttgaagaagcaacacaattttttgaaaatattcctaagattaatcgcaagttacaaacactagttgatgttggtcttggatacgtcacattaggtcaacaagctacaacgttatcaggtggtgaggctcaacgtgtgaaacttgcatctgaacttcataaacgttcaactggtaaatctatttatatcctagatgaaccgacaacagggttacatgttgacgatattagtagattattaaaagtattaaaccgattagttgaaaatggtgacactgttgtaattattgaacataacctagatgttatcaaaacagcagactatattatagacttaggtcctgaaggtggtagtggcggtggtactattgttgcgactggcacacccgaagatattgctcagacaaagtcatcatatacaggaaagtatttaaaagaagtacttgaacgagataaacaaaatactgaagataattaagattaaaagaagtgaaggatgttgtaaatttatccttcgcttctttttattaatttagtaatgaatagtagaaagaaaagatgcgtaaaaagaattatgttaagataggatcgatctagagtagctaaacataaatcgaaactgggagcgggacagaaatgataaagaatcactaatgatttattatgtattggttctttgtcattagccacagctattgtgtacttaaaaataggaatgcatgagtaaaactcatacataagaaatactaatttctaaagaaaaagtatttctttatgttgggtcccaccccaacttgcattgtctgtcgaaattgagaatccaatttctctgtgttggctccccgccaactaattcgaatttatcattttagagcttaggacattgatttatggcttggacttttatgtcgatatgaaccatgtaaattaagcaagcaataaattaatgattgatattgacttgtaaaataataacaataatgaacaattaatatttattttagcttttcaatgtagattggtgttatatttttgatatgataagaagagatgtaagagtagggataaatacaattgaggtgaacccatgttaacgacagaaaaactagttgaaacattaaagttagatttaatcgctggtgaagaaggactatcgaagccaattaaaaatgctgatatatcaagaccgggcttagagatggcaggttatttttcacattatgcgtcagatagaatacaactattaggaacaacggaactatcgttttacaatttattaccagataaggatcgcgcaggtcgtatgcgtaaactatgcagaccagaaacgcctgcaattattgtgacacgtggattgcagccaccagaagaattagttgaagctgcaaaagaattaaatacgccacttatagttgctaaagatgccactacaagtttaatgagtcgcttaacaacgttcttagagcatgcacttgcaaagacgacatctttacatggtgttttagtagatgtttacggtgttggtgtactaattaccggtgattcaggaataggtaaaagtgagactgcgttggagttagttaaacgtgggcatagattagtagcagatgataatgtagaaatacgtcaaattaataaagatgaactaatagggaaaccaccaaagttaatagaacatctattagaaatacgtggactaggtattatcaatgttatgactttatttggcgcgggttcaatattaactgaaaaacgaattagattaaatattaatttggaaaactggaacaagcaaaagttatatgaccgcgtaggtcttaatgaagagacgttaagtattttagatactgaaataactaaaaaaacaatacctgtaagacctggtagaaatgttgcggtaattattgaggtcgctgcaatgaactatcgattaaatatcatgggcattaacactgccgaagaatttagtgaaagattaaatgaagaaattatcaagaacagtcataagagtgaggagtaggttgaatgggtattgtatttaactatatagatcctgtggcatttaacttaggaccactgagtgtacgatggtatggaattatcattgctgtcggaatactacttggttactttgttgcacaacgtgcactagttaaagcaggattacataaagatactttagtagatattattttttatagtgcactatttggatttatcgcggcacgaatctatttcgtgattttccaatggccatattacgcggaaaatccaggtgaaattattaaaatatggcatggtggtatagcaatacatggtggtttaataggtggctttattgctggtgttattgtatgtaaagtgaaaaatttaaacccatttcaaattggtgatatcgttgcgccaagtataattttagcgcaaggaattggacgctggggtaactttatgaatcacgaggcacatggtggacctgtgtcacgcgcttttttagaacaattacatttgcctaattttataatagaaaatatgtatattaacggccaatattatcatccaacattcttatatgaatccatttgggatgtcgctggatttattatcctagttaatattcgtaaacatttaaaattaggagaaacattctttttatatttaacttggtattcaattggtcgattctttatagaaggattacgtacagatagcttaatgctcacaagtaatattagagttgcacaattagtatcaattcttttaattttaataagtataagtttaattgtatatagaaggattaagtataatccaccgttgtatagcaaagttggggcgcttccatggccaacaaaaaaagtgaagtagtgatattttgagaaaatttttatcaaaaacatatcatcatacaaaccctttatggcatgtataccgtcttgttaaattttcgaaagtttttaagaatgtaatcatcattgaattttcgaaatttattccaagtatggtactgaaaagacatatatataaacaacttttaaatattaatatcggtaatcaatcgtcgatagcttataaagtaatgttagatattttttatccagaactgattacgattggtagtaacagtgttattggttacaatgtaacaattttgacgcatgaagcattagttgatgaatttcgttatggaccagtgacgataggatctaacactttgattggtgcaaatgctaccattttacccggtataacgattggtgacaatgtaaaagttgcagctggtacggttgtttcaaaagatataccggataatggatttgcatatggcaaccctatgtatataaaaatgattaggaggtgacaattttatggcgcaaaagaataataatgtaattccaatgacttttgatgatgcattttatcgtaaaatggctaatcagaagtttaaacaaagagaatataaacgagctgctgaatactttgaaaaagtgttggaattgtcacctgatgatttggaaattcaaattgattatgcacaatgtctagtgcaacttggtattgctaaaaaagcagaacatttattttatgacaatattatttataataggcatctagaagatagcttttatgaattgagtcagctcaacattgaagttaacgaaccaaacaaggcattcttgtttggtattaattatgttattgttagcgacgaccaagattatagagatgaattagatcaaatgtttgatgtgaaatatcaaagtgaagaacaaattgaacttgaagctcaattgtttgtagttcaaatactattccaatatcttttttctcaaggtcgattaaaagatgcaaagaattatgtcttacatcaaccacaagaagttcaagatcatcgtgtcgtacgtaatttactggcaatgtgttatttatatctcggcgaatatgatacggctaaagcattgtacgaagcactattacaagaggatagtacagatatatatgcattatgccattatactttgctactttataacactaaggaaaatgaacaataccaaaagtatttaaaaatattaaataaagttgtacctatgaatgacgatgaaagttttaaattaggtattgttttaagttatttaaagcagtatcgtgcatcacaacaattgttgtaccctttatataaaaaagggaaatttttatcaattcaaatgtacaatgctttagcatataattattattatttaggtgaagaagacgaaagtcattactactgggataaattgaagcaaatttctaaagtggaaattggacatgcgccttgggtaattgaaaatagcaaagaagtttttgaccaacatattttgccattacttcaaagtgatgacagtcattatcgtttatatggtatttttttattggatcaattaaatggcaaagaaattgtgatgacggaaagtatttggcaggttctggaaaatctaaataattatgagaaattgtatttaacgtatttagttcaaggtttaacgcttaataaattagacttcattcatcgcggcttgttaacgctttaccataatgaattatttgtaattgaaaatgatttaatggttgcatggattaatcaaggtgaactcataattgctgaaaaagtagatttaactgatgttgagccatatatcggtgcgtttatttatttgtattttaaaaatcaacctcgaaacgttacaaagaagcaaattacaacatggttaggcataacacaatataaactgaacaaaatgattgaatttctcttgagcatatagatttatgaaaagttagatttattatataatgcgcataatgattaataatgaggaggcgttaataaaatgactgaaatagattttgatatagcaattatcggtgcaggtccagctggtatgactgctgcagtatacgcatcacgtgctaatttaaaaacagttatgattgaaagaggtattccaggcggtcaaatggctaatacagaagaagtagagaacttccctggtttcgaaatgattacaggtccagatttatctacaaaaatgtttgaacacgctaaaaagtttggtgcagtttatcaatatggagatattaaatctgtagaagataaaggcgaatataaagtgattaactttggtaacaaagaattaacagctaaagcggtcattattgctacaggtgcagaatacaagaaaattggtgttccgggtgaacaagaacttggtggacgcggtgtaagttattgtgcagtatgtgatggtgcattctttaaaaacaagcgcctattcgttatcggtggtggtgattcagcagtagaagagggaacattcttaactaaatttgctgacaaagtaacaatcgttcaccgtcgtgatgagttacgtgcacagcgtattttgcaagatagagcattcaaaaatgataaaatcgactttatttggagtcatactttgaaatcaattaatgaaaaagacggcaaagtgggttctgtgacattaacgtctacaaaagatggttcagaagaaacacacgaggctgatggtgtattcatctatattggtatgaaaccattaacagcgccatttaaagacttaggtattacaaatgatgttggttatattgagacaaaagatgatatgacaacatcagtaccaggtatttttgcagcaggagatgttcgcgacaaaggtttacgccaaattgtcactgctactggcgatggtagtattgcagcgcaaagtgcagcggaatatattgaacatttaaacgatcaagcttaattcgaagtcgaattaagatgttgagctgtaaattatttggatatttattttaatagtgttatcacattgttaaaataatgtcttaattttaaattaaagcaaattatatagaaaactagaacttagtacgtatcatttgtgcgttttaatgagttctagttttttaatatgttatattaaacttataactttatgggagtgggacagaaatgataaagagccactaatgatttattatgtagtggttcttacacattagccacagctaatgtgtacttaaaaataggaatacatgagtaaaactcatgcataagaaatactaatttctatagaaaaagtatttctttatcgttgtccggccccaacttgcacattatcgtaagctgacttttcgtcagcttctgtgttggggcccacaccccaactcgcattgcttgtagaatttcttttcgaaattctctgtgttggggccccaccccaactcgcattgcctgtagaaattgggaatccaatttctctttgttggggcccctgactagagttgaaaaaagcttgttgcaagcgcattttcattcggtcaactactagcaatataatattatagaccctaggacattgatttatgtcccaagctccttttaaatgatgtatatttttagaaatttaatctagacatagttaaaaataaatataaaacatcgttgcttaattttgtcatagaacatttaaattaacatcatgaaattcgttttggcggtgaaaaaataatggataataatgaaaaagaaaaaagtaaaagtgaactattagttgttacaggtttatctggcgcaggtaaatctttggttattcaatgtttagaagacatgggatatttttgtgtagataatctaccaccagtgttattgcctaaatttgtagaattgatggaacaaggaaatccatccttaagaaaagtggcaattgcaattgatttaagaggtaaggaactatttaattcattagttgcagtagtggataaagtcaaaagtgaaagtgacgtcatcattgatgttatgtttttagaagcaagtactgaaaaattaatttcaagatataaggaaacgcgtcgtgcacatcctttgatggaacaaggtaaaagatcgttaatcaatgcaattaatgatgagcgagagcatttgtctcaaattagaagtatagctaattttgttatagatactacaaagttatcacctaaagaattaaaagaacgcattcgtcgatactatgaagatgaagagtttgaaacttttacaattaatgtcacaagtttcggttttaaacatgggattcagatggatgcagatttagtatttgatgtacgatttttaccaaatccatattatgtagtagatttaagacctttaacaggattagataaagacgtttataattatgttatgaaatggaaagagacagagattttctttgaaaaattaactgatttgttagattttatgatacccgggtataaaaaagaagggaaatctcaattagtaattgccatcggttgtacgggtggacaacatagatctgtagcattagcagaacgactaggtaattatctaaatgaagtatttgaatataatgtttatgtgcatcatagagacgcacatattgaaagtggcgagaaaaaatgagacaaataaaagttgtacttatcggtggtggcactggcttatcagtcatggctaggggattaagagaattcccaattgatattacagcgattgtaacagttgctgataatggtgggagtacagggaaaatcagagatgaaatggatataccagcaccaggagacatcagaaatgtgattgcagctttaagtgattctgagtcagttttaagccaactttttcagtatcgttttgaagaaaatcaaattagcggtcactcattaggtaatttattaatcgcaggtatgactaatattacgaatgatttcggacatgccattaaagcattaagtaaaattttaaatattaaaggtagagtcattccatctacaaatacaagtgtgcaattaaatgctgttatggaagatggagaaattgtttttggagaaacaaatattcctaaaaaacataaaaaaattgatcgtgtgtttttagaacctaacgatgtgcaaccaatggaagaagcaatcgatgctttaagggaagcagatttaatcgttcttggaccagggtcattatatacgagcgttatttctaacttatgtgtcaatggtatttcagatgcgttaattcattctgatgcgcctaagctatatgtatctaatgtgatgacgcaacctggggaaacagatggttatagcgtgaaagatcatatcgacgcgattcatagacaagctggacaaccgtttattgattatgtcatttgtagtactcaaactttcaatgctcaagttttgaaaaaatatgaagaaaaacattctaaaccagttgaagttaataaggctgaacttgaaaaagaaagcataaatgtaaaaacatcttctaatttagttgaaatttctgaaaatcatttagtaagacataatactaaagtgttatcgacaatgatttatgacatagctttagaattaattagtactattcctttcgtaccaagtgataaacgtaaataatatagaacgtaatcatattatgatatgataatagagctgtataaaaatgaaaatagacagtggttctaaggtgaatcatgttttaaataagaaaggaatgactgtacgatgagctttgcatcagaaatgaaaaatgaattaactagaatagacgtcgatgaaatgaatgcaaaagcagagctcagtgcactgattcgaatgaatggtgcacttagtctttcaaatcaacaatttgttataaatgttcaaacggaaaatgcaacaacggcaagacgtatttattcgttgattaaacgtgtatttaatgtggaagttgaaatattagtccgtaaaaaaatgaaacttaaaaaaaataatatttatatttgtcgtacaaagatgaaagcgaaagaaattcttgatgaattaggaattttaaaagacggcatttttacgcatgaaattgatcattcaatgattcaagatgacgaaatgagacgcagttacttgagaggagcttttctggcaggtggctcagtgaataaccctgaaacatcttcgtatcatttggaaattttttctcaaaatgagagtcatgcagaaggcttaacgaaactaatgaatagttatgagttgaatgccaaacatttagagcgaaaaaaaggaagtattacgtatttaaaagaagcggaaaagatttcggattttcttagtttgataggtggctatcaagcgttattaaaatttgaagacgtacgcattgtaagagatatgcgtaattctgttaaccgactcgttaattgtgaaacggcaaatctaaataaaactgttagtgctgcgatgaaacaagtggagagcattaaattaattgataaagaaattggtattgaaaatttaccagacaggttgagagagattgctagaattcgagtagaacatcaagaaatttcgttgaaagagcttggagaaatggtgtcaactggtccaatttcaaaatcaggtgtaaatcatcgattaagaaaacttaatgatttagccgataagattagaaatggtgaacaaatagaattataagtaagaaggtgtttttggtagtgaattatcaaaaataccttttttatgattaaaaagtgtttaatgaataatagtcgactaactattaaattgagctggaaagtttaatgaaggaaattcaataaccaagtgttacctaattttctcattaagtagcatcatatttatcaatttggtcataagaaaatacgaatgtgataattaattgaatccctgaaagtccctgattatagacaaaaaaatcagcataaaaagaatcccgacattgcgggattctctgtattgaaaagtattgtattttatttaaatgcctccttgaagggaatcgaacccctatcttaagaaccggaatcttacgtgttatccattacaccacaaggagtaaatatgttaatcaaatcactgtactatgagaagtaaaataagtacaatctaaaatagatattatcagtttacaaaggaaagagacaagcgtcaaacaaagtagcgttttaaagtcaaagtgtttgaccaaatttgacttaatatgtaaaataatgagtaacagttattacaaggaggaaatatagatgaatttaattcctacagttattgaaacaacaaatcgcggtgaacgtgcatacgatatatactcacgtttattgaaagaccgtattattatgttaggttcacaaattgatgacaacgtagcaaattcaatcgtatcacagttattattcttacaagcacaagactcagagaaagatatttatttatacattaattcaccaggtggaagtgtaacagctggttttgcgatttatgatacgattcaacacattaaacctgatgttcaaacaatttgtatcggtatggctgcatcaatgggatcattcttattagcagctggtgctaaaggtaaacgtttcgcgttaccaaatgcagaagtaatgattcaccaaccattaggtggtgctcaaggacaagcaactgaaattgaaattgctgcaaatcacattttaaaaacacgtgaaaaattaaaccgcattttatcagagcgtactggtcaaagtattgaaaaaatacaaaaagacacagatcgtgataacttcttaactgcagaagaagctaaagaatatggcttaattgatgaagtgatggtacctgaaacaaaataattcaaagtaaagagtagactaagcagtctgctcttttttgtatgagtaaaccaaggtgtcaataaattgttcaaaacattttgagtaaaagcaaaaactaacgggtaaaaatatttgtgagaatttaattagacacgttgcgtctgcggttctacaatctaacaaatataaaggatgattttatgaaaggcattgaattacttaacaatccatttttaaacaaaggtatcgcttttactaacgaagaaagaaaacagttagggcttgaaggtttattacctgcgaatgttcgaactttagaacaacaagcagaacaatgttatgaacaattcaaggcgaaacaaaccgattttgagaaacgtttatttttaatggcaatttttaatcgtaatcgtacattgttttacaaattgacttcagagcatttagttgaatttatgccaattatttatgaccctgttattgcacaatcgattgaacaatataatgagaatttcagcagaccccaagatgcagtatttttatctgttgatagacaagaccaaattgaacaagaattgcgcaacgttgcaaatggcagagatattcgattaatcgtagtgacagatgcggaaggtatattaggtatcggcgattggggcgttgatggtgtagatattgcgataggaaaattaatagtatatacagcggcagctggaataaatccctcacaagtattacctgtatctttagatgtaggtactaataatgaacaattactgaatgatgacctttatttaggaaatcgtcataaacgtgtcgatgatgagacatattacgcatttgtagataaatttgtaagtgcagtacgtaaagaatatcctaatgcactattacattgggaagattttggtagagggcatgccaaaaatattttagacaaatatgaagatacgttaccaacttttaatgatgatattcaaggtacaggtatagttacattagctggcgtactaggtgcattaaatatttctaaagtaaattatacgaatcagacgtttttagtttatggtggtggtacagctggtatgggtattaccaatattttaaaagatgaactaattaaacagggtgtttcagaagaaaaagcaaatcagcatttctacattatggataaacaaggattgttgtttgatgatatggatgatttaactgaagcgcaacaagtatttgctaaaaataggaatgaattttcaaagacagtaaactggaaaaatttaaaagaagtaattgaaaatattaagcctactgttttaatcggtacatcaactcaaacaggtgcatttacagaagatgcagtaaaagagatgttaaagcatacagaacgtccaatgattttcccattgtctaatcctacaaaattagcagaagcaactgcacaagatttattaaaatggactaacggaaaagcattaattggaactggtatcccatataatgacattgaatacaatggtgtgaattacagtattggtcaagcaaataatgcattgatgtatcctggtttaggtttgggtcttattgcgtcaaaagcgaagaaagtaaatcaacagattctatcagctgcgagtcatgcacttggtggcatggtcaatccagatgaaccaggagctgcagtcttaccacctgttgagaaaatacatcaatgttctcgtgccatagccaaagcggttgcacaaagtgtcattgatcaaggattaaacgctgaaactattgatgatattgacaaagcaattgaagctgaaatttggtatcctgaatacaaatcatacatttaattttataaagtagtaaaaggtcatttgaacattttgtttcaagtggccttttcgtatttactttaaaattaatcaaccaatattcataagtgactttaaagttatatctatatgtaatatcagcaaatagaaaagtctagagagatttaacgaattatcttctagactttttgcttgaagtggagtaggagagatcaatgtcccactcacttactaattaaatcttcaagtgccatttttaaattactatatttaaattggaatcccaatgcttgaattttattaggtaatactttttgagtatccaatactactgttgacatttgaccaagtatgagacgcattgcaagacttggtgcccaagtttcatgaggcttatgcatagctcttgctaaagtgtagccaaataaattttgacgctcaggtataggtgcagttaaattaaacggaccactagctgactcgttatttattaaaaataaaatagcttgaattaaatcattgatatgaatccatgaataccattgttgaccagaacctaatttaccaccaatgtaatattcgtatggtagtttcattgtttgtaacgcaccgccttcattcgataaaattataccgaaacgaccgatgacaactcgtgtacctaattgttcaaattgttgtgcgaaacgttcccattgatacacaatatctgataagaaatcaaatggtaaagttttataaacttctgtgtaactcataaataaatcaggaggatagtaaccagtggcactagcattaaataaaactttaggtgctttattacgtgatttaaacaattcatataaagcttgcgtagattgaattctacttagcattagcgtttgtttatattccggtgtccatcgtttattcaatgtagcacctgctaagttgatgaccacatcgattttttgaggaactttgtgttcccacccagatttagcccagttgacatatgaaattttcttatcatttgaaatttggtcgtgtcgcgttaatatcgtgatatgtgaatctgattttttgatttcattaactaattgagatccaaccataccagtcccaccagtaattaagtattgtttcattatcattcaccccatgtaattttgtatttagttactatttaataatcattattgttgttcaaaggttatacattatttagacaataatatgtcaataactttttttgaattgtattttaataaaaatgatataagttataataaaggtgtaccttcgataacgaataaacatctcttaaaagtatgtgtaaaacgctgcatgatacaaacgaaggtaaaaatttgactccctttagtagtggacccgtacgtttatcgtgcgggtcgttttcatttatatcttattcccgttatacatcaattcaaagcattaattttttaaacaaatttaagaatagatagtaatataacaatctaaacataaaaacttttaacacaacacttaaactaatgctttaattttcaatacgtagctataatttgttgtaaaatcaaaaaggttaatatgttaattttcaaaaaaaggctcaaaatatgtttgatttcgttattaaatgttaagatatataagactactatttctttgtaaaaatgaatccgatttacgagtgagtaatagtgaatacagttttaagttgaagaaggcaaaaagagtaaatgtttattaatgtttgtagaaacaaggtaagcaaattagttgtgaaaatgttaatagttacgtgataatttctatatttaaattagtttgaagtgagggagagtatgtcgaatcaaaattacgactacaataaaaatgaagatggaagtaagaagaaaatgagtacaacagcgaaagtagttagcattgcgacggtattgctattactcggaggattagtatttgcaatttttgcatatgtagatcattcgaataaagctaaagaacgtatgttgaacgaacaaaatcaggaacaaaaagaaaagcgtcaaaaagaaaatgcagaaaaagagagaaagaaaaagcaacaagaggaaaaagagcagaatgagttagattcacaagcaaaccaatatcagcagttgccacagcagaatcaatatcaatatgtgccacctcagcaacaagcacctacaaagcaacgtccagctaaagaagagaatgatgataaagcatcgaaggatgagtcgaaagataaggatgacaaagcatctcaagataaatcagatgataatcagaagaaaactgatgataataaacaaccagctcagcctaaaccacagccgcaacaaccaacaccaaagccaaataataatcaacaaaacaatcaatcaaatcaacaagcaaaaccacaagcaccacaacaaaatagccaatcaacaacaaataaacaaaataatgctaatgataagtagtatttagtcaaacaaaaatgaaccagtatgacagacaacacaattaattaggttgtcgcgaatattggttcttatttttataattgttaattaggggagagatgatacttaaatagttagttgtttattttgcggatagtgaaatttattttgagtgaggtgggacagaaatgatattttcgcaaaatttatttcgtcgtcccaccccaacttgcattgtctgtagaaattggaaatccaatttctctatgttggggccccgccaacttgcattgcctgtagaatttcatttcgaaattctctatgttggggccccagactttaattgaaaaaaggttgttacaagtgcattttcgttcagtcaactactggcaatgtaacttttcagattctagagtgtaaatgtcaatataaaattgtacatgtttaaacaatcaaaagtgtacattattaaattatcatttccatctagagcattgatttatgtcctagtctcaaataataagcaaatgattagagagtcagtataagggtatacatttgactacagcgaataaaataaaacgttttgttgtataacaaatcgaaaacatattgcaagcgctttatcaaattatttagaaaatttaagttttatgcttgcaatttttgaaatagaatagtactattgcaagtgtaaagaggttaatttttgtcccacgtgggacttaaaaaggcaaccactggttgtgacatatccttatttacatttataaatataaggaggaggtagtagtgaaagacttattgcaagcacagcaaaagctttataccggatctcatagataaaatgtataaacgttttttctattctttactactatctcaaaaaatcagcctgtcggacgtcgaagtttaagcgaacatatggatatgactgaacgtgtactgcgttctgaaacagatatgcttaagaaacaagatttgataaaagttaagcctaccggtatggaaattacagctgaaggtgagcaactgatttcgcaattgaaaggttactttgatatctatgcagatgataatcgtctgtcagaaggtattaagaataaatttcaaattaaggaagttcatgttgttcctggtgatgctgataatagccaatctgttaaaacagaattaggtagacaagcaggtcaattacttgaaggcatattacaagaagatgcgatagttgctgtaactggcggatccacgatggcatgtgttagtgaagcaattcatttattaccatataatgtattcttcgtaccagccagaggtggactaggcgaaaatgttgtctttcaggcaaacacaattgcagccagtatggcacaacaagctggcggttattatacgacgatgtatgtacctgataatgtcagcgaaacaacatataacacattgttgttagagccatcagtcataaacactttagacaaaattaaacaagcaaacgttatattacacggcattggtgatgcgctgaagatggcgcatcgacgtcaatcacctgaaaaggtcattgaacaacttcaacatcatcaagctgtcggagaggcatttggttattattttgatacacaaggtcaaattgtccataaggttaaaacaattggacttcaattagaagaccttgaatcaaaagactttatttttgcagttgcaggaggcaaatcgaaaggtgaagcaattaaagcatacttgacgattgcacccaagaatacagtgttaatcactgatgaagccgcagcaaagataatacttgaataagagataaaaagtttaatactttttaaatatcattttaaaggaggccattataatggcagtaaaagtagcaattaatggttttggtagaattggtcgtttagcattcagaagaattcaagaagtagaaggtcttgaagttgtagcagtaaacgacttaacagatgacgacatgttagcgcatttattaaaatatgacactatgcaaggtcgtttcacaggtgaagtagaggtagttgatggtggtttccgcgtaaatggtaaagaagttaaatcattcagtgaaccagatgcaagcaaattaccttggaaagacttaaatatcgatgtagtattagaatgtactggtttctacactgataaagataaagcacaagctcatattgaagcaggcgctaaaaaagtattaatctcagcaccagctactggtgacttaaaaacaatcgtattcaacactaaccaccaagagttagacggttctgaaacagttgtttcaggtgcttcatgtactacaaactcattagcaccagttgctaaagttttaaacgatgactttggtttagttgaaggtttaatgactacaattcacgcttacacaggtgatcaaaatacacaagacgcacctcacagaaaaggtgacaaacgtcgtgctcgtgcagcggcagaaaacatcatccctaactcaacaggtgctgctaaagctatcggtaaagttattcctgaaatcgatggtaaattagatggtggtgcacaacgtgttcctgtagctacaggttcattaactgaattaacagtagtattagaaaaacaagacgtaacagttgaacaagttaacgaagctatgaaaaatgcttcaaacgaatcattcggttacactgaagacgaaatcgtttcttcagacgttgtaggtatgacttacggttcattattcgacgctacacaaactcgtgtaatgtcagttggtgaccgtcaattagttaaagttgcagcttggtatgataacgaaatgtcatatactgcacaattagttcgtacattagcatacttagctgaactttctaaataattttagtatagtttttattcaaatacgctagtgctcagaactatttagcattaattaaagcttatgagtaagcggggagcacaaacgcttctccgcttatttttatataaaatttcctaattacaaggaggaaacaccatggctaaaaaaattgtttctgatttagatcttaaaggtaaaacagtcctagtacgtgctgattttaacgtacctttaaaagacggtgaaattactaatgacaaccgtatcgttcaagctttacctacaattcaatacatcatcgaacaaggtggtaaaatcgtactattttcacatttaggtaaagtaaaagaagaaagtgataaagcaaaattaactttacgtccagttgctgaagacttatctaagaaattagataaagaagttgttttcgtaccagaaacacgcggcgaaaaacttgaagcagctattaaagaccttaaagaaggcgacgtattattagttgaaaatacacgttatgaagatttagacggtaaaaaagaatctaaaaatgatccagatttaggtaaatactgggcatctttaggtgatgtgtttgtaaatgatgcttttggtactgcgcatcgtgagcatgcatctaatgttggtatttctacacatttagaaactgcagctggattcttaatggataaagaaattaagtttatcggtggcgtagttaacgatccacataaaccagttgttgctattttaggtggagcaaaagtatctgacaaaattaatgtcatcaaaaacttagttaacatcgctgataaaattatcatcggcggaggtatggcttatactttcttaaaagcgcaaggtaaagaaattggtatttcattattagaagaagataaaatcgacttcgcaaaagatttattagaaaaacatggtgataaaattgtattaccagtagacactaaagttgctaaagaattttctaatgatgccaaaattactgtagtaccatctgattcaattccagcagaccaagaaggtatggatattggaccaaacactgtaaaattatttgcagatgaattagaaggtgcgcacactgttgtatggaatggacctatgggtgtattcgagttcagtaactttgcacaaggtacaattggtgtatgtaaagcaattgcaaaccttaaagatgcaattacgattatcggtggcggtgattcagctgcagcagcaatctctttaggttttgaaaatgacttcactcatatttcaactggtggcggagcgtcattagagtacctagaaggtaaagaattgcctggtatcaaagcaatcaataataaataataaagtgatagtttaaagtgatgtggcatgtttgtttaacattgttacgggaaaacagtcacaagatgacatcgtgtttcatcacttttcaaaaatatttacaaaacaaggagtgtctttaatgagaacaccaattatagctggtaactggaaaatgaacaaaacagtacaagaagcaaaagacttcgtcaatgcattgccaacattaccagattcaaaagaagtagaatcagtaatttgtgcaccagcaattcaattagatgcattaactactgcagttaaagaaggaaaagcacaaggtttagaaatcggtgctcaaaatacgtatttcgaagataatggtgcgttcacaggtgaaacgtctccagttgcattagcagatttaggcgttaaatacgttgttatcggccattctgaacgtcgtgaattattccacgaaacagatgaagaaattaacaaaaaagcgcatgctattttcaaacatggtatgacaccaattatttgtgttggtgaaacagatgaagagcgtgaaagtggtaaagctaacgatgttgtaggtgagcaagttaagaaagctgttgcaggtttatctgaagagcaacttaaatcagttgtaattgcttatgaaccaatctgggcaatcggaactggtaaatcatcaacatctgaagatgcgaatgaaatgtgtgcatttgtacgtcaaactattgctgacttatcaagcaaagaagtatcagaagcaactcgtattcaatatggtggtagtgttaaacctaacaacattaaagaatacatggcacaaactgatattgatggggcattagtaggtggcgcatcacttaaagttgaagatttcgtacaattgttagaaggtgcaaaataatcatggctaagaaaccaactgcgttaattattttagatggttttgcgaaccgcgaaagcgaacatggtaatgcggtaaaattagcaaataagcctaattttgatcgttattacaacaaatatccaacgactcaaatcgaagcgagtggcttagatgttggactacctgaaggacaaatgggtaactcagaagttggtcatatgaatatcggtgcaggacgtatcgtttatcaaagtttaactcgaatcaataaatcaattgaagacggtgatttctttgaaaatgatgttttaaataatgcaattgcacacgtgaattcacatgattcagcgttacacatctttggtttattgtctgacggtggagtacacagtcattacaaacatttatttgctttgttagaacttgctaaaaaacaaggtgttgaaaaagtttacgtacacgcatttttagatggtcgtgacgtagatcaaaaatccgctttgaaatacatcgaagagactgaagctaaattcaatgaattaggtattggtcaatttgcatctgtgtctggccgttattatgcaatggaccgtgacaaacgttgggaacgtgaagaaaaagcttacaatgctattcgtaactttgatgccccaacttatgcaactgccaaagaaggtgtggaagcaagttataatgaaggcttaactgacgaattcgtagtaccattcatcgttgagaatcaaaatgacggtgttaatgatggagatgcagtgatcttctataatttccgacctgatagagcagcacaattatcggaaatttttgcgaacagagcattcgaaggctttaaagttgaacaagttaaagatttattctatgcaacattcactaagtataatgacaatatcgatgcggctatcgtcttcgaaaaagtcgatttaaataatacaattggtgaaattgcacaaaataacaatttaactcaattacgtattgcagaaactgaaaaatatcctcacgttacttactttatgagtggtggacgcaatgaggaatttaaaggtgaacgtcgtcgtttaattgattcacctaaagttgcaacgtatgacttgaaaccagaaatgagtgcttatgaagttaaagatgcattattagaagagttaaataaaggtgacttggacttaattattttaaactttgctaaccctgatatggttgggcatagtggtatgcttgagccgacaatcaaagcaatcgaagcggttgacgaatgtttaggcgaagtggttgataagattttagacatggatggttatgcaattattactgctgaccatggtaactctgatcaagtattgacggatgatgatcaaccaatgactacgcatacaacgaacccagtaccagtgattgtaacaaaagaaggcgttacacttagagaaactggtcgcttaggtgacttagcacctacattattagatttattaaatgtagaacaacctgaagacatgacaggtgaatctttaattaaacactaatattgtaaaagatgttaagtaaacgcttaatgacacttattttttgaaaataatagtaatatcattttgttaaatgaaagaataaagctataataattatagaataactatttaaaggagattataaacatgccaattattacagatgtttacgctcgcgaagtcttagactctcgtggtaacccaactgttgaagtagaagtattaactgaaagtggcgcatttggtcgtgcattagtaccatcaggtgcttcaactggtgaacacgaagctgttgaattacgtgatggagacaaatcacgttatttaggtaaaggtgttactaaagcagttgaaaacgttaatgaaatcatcgcaccagaaattattgaaggtgaattttcagtattagatcaagtatctattgataaaatgatgatcgcattagacggtactccaaacaaaggtaaattaggtgcaaatgctattttaggtgtatctatcgcagtagcacgtgcagcagctgacctattaggtcaaccactttacaaatatttaggtggatttaatggtaagcagttaccagtaccaatgatgaacatcgttaatggtggttctcactcagatgctccaattgcattccaagaattcatgattttacctgtaggtgctacaacattcaaagaatcattacgttggggtactgaaattttccacaacttaaaatcaattttaagtaaacgtggtttagaaactgcagtaggtgacgaaggtggtttcgctcctaagtttgaaggtactgaagatgcagttgaaacaattatccaagcaatcgaagcagctggttacaaaccaggtgaagaagtattcttaggatttgactgtgcatcatcagaattctatgaaaatggcgtatatgactacagcaagttcgaaggcgagcacggtgcaaaacgtacagctgcagaacaagttgactacttagaacaattagtagacaaatatcctatcatcacaattgaagacggtatggacgaaaacgactgggatggttggaaacaacttactgaacgtatcggtgaccgtgtacaattagtaggtgacgatttattcgtaacaaacactgaaattttagctaaaggtattgaaaacggaattggtaactctatcttaattaaagttaaccaaatcggtacattaactgaaacattcgatgcaatcgaaatggctcaaaaagctggttacacagcagtagtttctcaccgttcaggtgaaacagaagatacaacaattgctgatatcgctgttgctacaaacgctggtcaaattaaaactggttcattatcacgtactgaccgtattgctaaatacaatcaattattacgtatcgaagatgaattatttgaaactgctaaatatgacggtatcaaatcattctataacttagataaataatcattttaaacattaagtactgccataattttagttgaggattattatgtcggtataaattgaataaagtttttgagttcacgcttaaaaagttcacgcttgtatttataacctgccacagagttgagactgtggtaggttttttattttgaagtattattcataacagactaataatcatgaggtaactaataacacatatttaacttgtattcttaaactggtataataaatttatgttgaaatgaatattgtatgacagggtattcacttttattaaaaggtaaaattaaataaaggttttatagaacgtatttaaatatatgaggagtaaacaaatggctgatagaacgaataaagaaattaaaacaggacgctttattgcaactgcatcaatcgtattctcaatattgttgattattcattactttgtttcgttggataatgcgactgccaaagcattactcaatttaacgaatcaaaacacttcagataaagcgatagattacattttaaacagctttagattcactggtataatgtatattttggcttatctagcaggcttcatcactttttggaatcgacatacttatgtgtggtggtttatgtttgcagtttatgtatcaaatagtttgtttacgttgattaatttatcaatcacaattcaagcaataaaagctgcacacggtgcgtacttaacattgccaattttaattgttattataggttcggttgcattagcgatttatatgcttgttgtttctatcaaacgtaaaagtacatttaatcgctagaaaattgattttaacaataaaaatatgatatactacttgtcgtatataaggaacggaggacaatttatgcatacatttttaatcgtattattaatcattgattgtattgcattaataactgttgtactactccaagaaggtaaaagcagtggactttcaggtgccatcagtggtggtgctgagcagttattcggtaaacaaaaacaacgtggcgtcgatttattcttaaatagattaacaattattttatcaatattattttttgtacttatgatttgcataagttatcttggtatgtaaggtccggcgatgtaaatgtcgggcttttttatttataattagaataataaaggactcatgttcaattattagaaacatattgtttaattaagtacgtttgttaattgtgaaaaaggagcgttagatttatgcaaataaagttaccaaagcctttcttttttgaggaaggtaaacgtgccgtgttattactacatggttttacaggcaattcgtctgatgttcgtcaattaggtcgatttttacaaaagaaaggttatacatcgtatgcaccacaatatgaaggtcatgcagcaccaccagaagagatacttcaatcaagtccttttgtttggtttaaagatgccttagatggctatgactaccttgttgaacaaggttatgatgaaatcgttgttgctggcttgtcattaggtggcgattttgcattaaaattaagcttaaatcgagatgtaaagggtattgtaacgatgtgtgctcctatgggtggcaaaactgaaggtgccatttatgaaggctttttagaatatgcacgcaattttaaaaagtatgagggtaaagatcaagaaacgattgataacgaaatgcatcatttcaaaccaactgaaactttaaaagaattaagtgaagcattagatacgattaaagatcaagttgatgaggtgtttgacccaattttagtgattcaagcagaaaacgacaatatgattgatccacaatccgcaaattatatatatgaacatgtagactctgacgaaaaagatatcaaatggtatagtcagtcaggacatgttattacaattgataaagaaaaagaacaagttttcgatgatatttatcaatttttagagtcattagactggtcagaataaaaagagattttaacattagaaaggaggggcataatgaatttaaagcaatcaatagaagagattattaatcaacctgaatatgaacctatgtcagtgtcagattttcaagatgcattaggtttaagcagtgccgactcgtttagagatttaattaaggtgcttgtggagttagaacaatcaggattaatcgaacgtacaaaaacggacagatatcaaaaaaagcatagttcaaaaggtcattcaaaattgataaagggaacgttaagtcaaaacaaaaaaggttttgctttcctaagacctgaagacaaagatatggaagatatatttattcccccaacaaaaattaatcgtgccttggatggagatactgttattgtagaaatccatcaatcaaaaggtgagcataaaggtaaaattgaaggggaagttaagtcaattgagaagcattcagtaactcaagtggttggtacgtatagtcaggctagacattttggttttgtcattccagatgataaacgaattatgcaagatattttcattcctaaaggtcaaagcttaggtgcagtagatggtcacaaagtattagttcaaattactaagtatgctgacggttcagataatccagaaggacatatttctgctattttaggacataaaaatgatcctggcgtagatattttatctattatctatcaacatggcatagaaattgaatttcctgatgaagtgttacaagaagctgaagcaacaccagacaatatagaagatagtgaaattaaaggacgtcatgatttacgtgatgaattgacaattactattgatggcgcggatgctaaagacttagatgacgcaattagtgttaaaaagttagcgaatggtaatacgcaattaactgtaagtattgctgatgtcagctattatgtaacagaaggttctgcattggataaagaggcatatgatagagctacaagtgtatatcttgttgaccgtgtaattccaatgattccacatcgattaagtaatggtatttgttcattaaatcctcacgttgatcgtttaacgttaagctgtcgcatggaaattgatgctagtggtcgcgttgttaaacatgaaatctttgatagtgtgattcattctgattatcgaatgacgtatgatgcggtaaatcagattattactgaaaaggatcctacgattcgagagcagtataatgaaattacgcctatgctagatttagcacaagatttatcaaatcgtttaattcaaatgagaaaacgccgtggtgaaattgattttgatattagcgaagcgaaagtactagttaacgaagatggtatacctacagatgttcaattgagacaacgtggtgaaggcgaacgtcttattgagtcatttatgttaattgcaaatgaaacagttgctgaacattttagtaagttagatgtaccatttatttaccgagtgcatgagcaacctaaatcagatcgcttaagacaattctttgattttattacaaactttggcatcatgattaagggtactggcgaagatattcatccaacaacacttcaaaaggttcaagaagaagtagaaggtcgacctgaacaaatggtcatttcaacaatgatgttacgttcaatgcaacaagcgcattatgatgatgtgaacttgggacattttggcttatcagctgaatattatacgcattttacatcaccaataagacgttatcctgatttaacagttcatcgtttaatccgtaagtatttaattgagaaatcaatggataacaaagaagtgaagcgttgggaagacaaattgcctgagttagctgaacatacttctaaacgtgaacgtcgtgctattgaggcagaacgtgatactgatgaattgaaaaaagcagaatatatgattcaacatattggtgatgaatttgaaggtattgtcagctcagtagctaacttcggtatgttcattgaattgccaaatacgatagaaggtatggttcatattgcgaatatgactgatgattattaccgttttgaagagcgtcaaatggcattaattggtgagcgtcaagctaaagtatttagaattggtgacacagttaaggttaaagtgacgcatgttgatgtagatgaacgattaattgattttcaaattgtaggtatgcctttaccgaaaaatgatcgatcacagcgcccagcacgaggtaagacaattcaagctaaaacgcgtggtaaatcattagataaatcgaaatctgatgataaaggtcataagaaaaaaggtaggcaacgtaaaggtaaaaatgaacgtaaaaatgacaaatcaggaaacagtaaacataagccattttataaagataaaagtgtgaaaaagaaagcacgtcgtaagaaaaaataagcagcaatgaggtgagtatgaatggctaagaagaaatcaccaggtacattagcggaaaatcgtaaagctagacatgattataatattgaagacacgattgaagcgggaattgtattgcaaggcacagaaataaaatcaattcgccgaggtagtgctaaccttaaagatagttatgcgcaagttaaaaacggtgaaatgtatttgaataatatgcatatagcaccatacgaagaagggaatcgttttaatcacgatcctcttcgttctcgaaaattattattgcataaacgtgaaatcattaaattaggtgatcaaacacgtgaaattggttattcgattgtgccgttaaagctttatttgaagcatggacattgtaaagtattgcttggtgtcgcacgaggtaagaaaaaatatgataaacgtcaagctttaaaagaaaaagcagtcaaacgagatgttgcgcgcgatatgaaagcccgttattaagcgatttggttgcttaatcgggctatatttgatatagttatatgtgcttttgtaaattgcaaaagtatgatttgtttgatttattatttcggggacgtttctggattcgacaggggtcccccgagctcattaagcgtgtcggagggttgtcttcgtcatcaacacacacagtttataataactggcaaaacaaacaataatttcgcagtagctgcctaatcgcactctgcatcgcctaacagcatttcctatgtgctgttaacgcgattcaaccttaataggatatgctagacactgccgtttgaagtctgtttagaagaaacttaatcaagctagcatcatgttggttgtttatcacttttcatgatgcgaaacttttcgataaactacacacgtagaaagatgtgtatcaggacctctggacgcgggttcaaatcccgccgtctccatatttgtagcctacagcctttgtggttgtgggctttttattttagagtgcacaaaaagcgcacagaaaatgcacatgatacaaaaagacaccaccaaatttagttggtagtgccttttaagtatttaactgtgaatcgtctacacttaattggacaaattctatattgaaattttcgggataatcgtaattgcgaaactgttatatgtgttaaatatgatgtgaagtggctaatatagactgccagaatatggaaatgaatcttgatgtccaaaagtgattgaaagataattattatatgatatgctgaaaaagggtgtttattaagggattgtataagttctaataaggagtttttacaatgtacaaatacttaagaaaaatttccgttgctactattgcgtcttttgttttggtggggcctgtttattctacggtagaatcaggtaaagctaatgctgaaactgctaaagcggttgataaggaaatgaagcaaagagaaaaaattggaaatgctttgttagaagagatagataatagtaaagaagattttaaagacccaagtgtaactgaaaaattaaaagggcaagttagagattataaaaatggtgttgcagagagaggtaaagctactataacggcaaaagctggagctaaagctatccgagctactgtaaataagattggagagaaagcttgggataaattagttgctaaaatagaaaatactactggcacaaagctagttatgttccattatcaaagtattaataagttttgcgatattttaacaggttttgagggtaatttagctgagggtatagctacaggattgactaataattttggtttcaataaacaatttgcatatattgtagcaagagctttcattgctattgtattataggtgtgtgtttgtgatgagtaccaataaaaaagtttatttgttgtttttaataataacttttattatttatatatctttacctgtaattcttgggaaaaatacatttgatgctcgtttgtttgttatttttcccttactcttttttggagcatttttgttttcatctaataataaaaagaagtgaaatagtaacaaattaagtattgtttgaaaaatgagttcacgaaaaatgttgcatggtattcgtgaaattatgatcgagtcatttcaaaaatgaccatttcaaaacaacaaaaaagagtaggcgagctactcttttttgttatatttaacaattaaattagtgtgtcattatgagtgtaagtaagctaatttacaatgacaataataattacaaagattataacgctaaatgcgagcattcataaatttatacttcatctaaactactgtggtcgtcatctttttgcttttctttttctttctctcgttcttgttcttttttgtactcttcttcaaattctttttctttcttttctacttcttctcttgtttccgctctatgagaaaaatcttcggttttaagtttactaaatttgaatgatttagaatcaactgttttatcttctgagtatttatggacatttaaattaatatttccatcacctcttaactcatagataaacatggcttgtgcagttttgccttttttaatttgatcttggttatgttctgtccaatctttatattttttatcacttaaaagataaccatctcttaatttatttactgtatttttatcatcttgagtgatattaatatagtcatgagaaatagaagatggatttaaatctttatcgtcttttttagcagtaatttccattttaaaagcgatatatttctttttctcatctttttcattgatgataaacggttcttttattttagcttcaaatttgtcactaacaatagtatcgcctttaatttttatatccatattttttttgcttttaaattctttaagttcttcatttaattcttcattgtcattttctttctttttgtgactagtgctctctttttttgcactatcttgatgatgtccacaagcacctaagataagtgtacttgctaataatatccccattacttttttcatttaacatgtctcctttatttcgcaaaaatttatttttaaaaactcgtaacgatataaaattgcttatcgttttgagtaattaaacaaagttgatattttgtgagattctaagatgatattaaataattcttgtaataatgattctatgtattgttgcaataaattaatggaactataattactaatattatattacttttattgatagaaatatattacttttttaaaaaacttgtaatatatcgaaagatttaaatgtaaaattttgatttgttaagaaattacgtttataaaaataaaaaaattcaacttatttgtatgagatgaatatgtattgaagaacatgagttattaaattggaaataatgctcaaagatgggagctcttaaaagcgttattgtattctttagtcaaagcaaatagattgccataataataaacgtacttgatggttaaaaaattacttaagactataaagcaaaactttttatatgagcagtcgaatataacgtttaaaatgtttctttttggatataaacgattaagtaaaatgatttttcagtttgaaattaatcatataaatttcttaagggaagggtgatatcttaatgattaatattatttcagctataggatctattggaacatttattatggctttattttattttgtatcagtttcagttcaactttatcaaatgaaaattagctttctgccagctttaggttttaaccaaattttattagaaagggaggggggtcaacttaatataatgaattcggctacagatgagcatcatcataaagattatattaaactatataatttaggtggtggtgctgctaaaaaaattgcaatagaggttttattggggaatgataaagtcatacagaaaaaatacgtgaatattttacctagtaaagaagggtacatgttaccaattaataaaaatgtgtacgaagaattagaaagaacgattgagaataatggttatgaagctgatttgaatgtacgtatgacttattatcataatgtaagtcgcaaacaacaggaagttatattaaaaggtcaaatcgaccgttttaataattataataataaagaaatttatgatttgcagtttatctaaaaattgatttaagagtgtagttgtttattgcgaaaaatatcattcaattttaatgaaataatggcgtcattactataaaatattactttatgttgtaatgcatttttctataagatagaactaaaaggaggggcaaagatgcaaattagacaaatacatcaacatgactttgctcaagttgaccagttaattagaacggcatttgaaaatagtgaacatggttatggtaatgaatcagaactagtagaccaaattcgtctaagtgatacgtatgacaataacttagaattagtagctgttcttcaaaatgaagttgtagggcacggtttactaagtgaagtttatcttgataacgaggcacaacgggaaattggattagtgttagcacctgtatctgttgatattcatcatcaaaataaaggtattgggaagcgattgattcaagcattagaacgagaagcaatattaaaaggatataattttatcagtgtattaggatggccgaagtattatgccaatctaggatatcaacgcgcaagtatgtacgacatttatccaccatatgatggtataccagatgaagcgtttttaattaaagaattaaaagtgaaaagtttagcgggaaaaacaggtaccataaattacacatctgcttttgaaaaaatatgatttcaagttaggattacattaggcagagttcatattaagaatacaaattgtttgcaatgaaatcgtgcgttgtcgtttgcaattttcaaaacagagaaaatgaaaagctttttgttgtaaatatttattgtagttaataaaattctaaaacaaattaattgccattatgcaattttggtgtataattgcattaatagagattaaatatatattaaaagggtatacagttaatataaaatgactttttaaaaagagggaataaaatgaatatgaagaaacaagaaaaacacgcaattcgtaaaaaatcgattggcgtggcttcagtgcttgtaggtacgttaatcggttttggactactcagcagtaaagaagcagatgcaagtgaaaatagtatgacacaaacggaaaatacgagaaatgagagcaaaagtaatgatccaagtagcgttaatgctgcacctaaaacagacaacacaaacgtgagtgattctaatacaacgacaaacactaatagtgacgaaacgaatgtagcgcaaaatccagcacaacaggaaacgacacaatcagcatcaacaaatgcaactacagaagaaacaccggtaactggtgaagttactactacggcaacgaatcaagctaatacaccggcaacaactcaatcaagcaatacaaatgcggaagaatcagtgaatcaaacaagtaatgaaacgacttctaatgatactaatacagtatcatctgtaaattcacctcaaaattctacaaatgcggaaaatgtttcaacaacgcaagacacttcaactgaagtaacaccttcaaacaatgaatcagctccacagagtacagatgcaagtaataaagatgtagttaatcaaacggttaatacaagtgcgtctagaatgagagcatttagtttagcggctgcagatgcaccggctgttggcacagatattacgaatcagttgacgaatgtgacagttggtattgactctggtacgactgtgtatccgcaccaagcaggttatgtcaaactgaattatggtttctcagtaccaaattctgcggttcaaggtgacacattcaaaataactgtgcccaaagaattaaacttaaatggtgtaacttcaactgctaaagtgccaccaattatggccggagatcaagtattggcaaatggtgtaatcgatagtgatggtaatgttatttatacatttacagactatgttgatactaaaaatgatgttaaagcaacactaactgtgcctgcatacattgatccagaaaatgtaacgaaaacaggtaatgtgacattgacaactggcataggaaatacaacagcaaacaaaacagtattagtagattatgaaaaatatggtaagttttataacttatctattaaaggtacaattgaccaaatcgataaaacaaataatacgtatcgtcagacaatttatgtcaatccaagtggagataacgttattgcaccggttttaacaggtaatttaaaaccaaatacggatagtaatgcattaatagatcagcaaaatacaagtattaaagtatataaagtagataatgcagctgatttatctgaaagttactttgtgaatccagaaaactttgaggatgtcactaatagtgtaaatattacattcccaaatccaaatcaatataaagtagagtttaatacgcctgatgatcaaattacaacaccgtatattgtagttgttaatggtcatattgatccgaatagcaaaggtgatttagctttacgttcaactttatatggatataactcaaatataatttggcgctctatgtcatgggacaacgaagtagcatttaataacggatcaggttctggtgacggtatcgataaacctgtggttcctgaacaacctgatgagccgggtgaaattgaaccaattccagaggattcagattctgacccaggttcagatagtggttcagattctggcagcgattctaattcagatagcggttcagattcgggtagtgattctacatcagatagtgattcagattcagcgagcgattcagattcagcgagcgattcagattcagcgagtgattcagattcaacgagtgattcagattcaacgagtgattcagattcaacgagtgattcagattcaacgagtgattcagattcagcgagtgattcagattcagcgagtgattcagattcaacgagtgattcagattcaacgagtgattcagattcagtgagtgattcagattcagcaagcgattcagattcagatagtgactcagactcagactcagacagcgattcagattcagatagtgactcagactcagacagcgattcagattcagatagcgattcagattccgacagtgactcggattcagatagcgattccgactcagacagtgactcagattcagatagcgattcagattcagacagcgattcagaatcggatagcgactcagacagcgactcagaatcagaaagcgactcagattccgacagtgactcagattcagatagtgactccgattcagacagcgattccgattcagacagtgactcagactcagacagtgactcagactcagatagcgattccgactcagacagtgcctcagactcagatagcgattccgattcagacagtgactcagactcagacagtgattcagactcagataatgactcagactcagacagcgattcggattcagcgagtgattccgactcaggtagtgactccgattcatcaagtgattccgactcagacagtgcctctgattcagatagtgactcggattcaacgagtgacacaggatcagacaacgactccgactcagaaagtgattcaaatagcgattctgagtcaggttctaacaataatgtagttccgcctaattcaccaaaaaatggtactaatgcttctaataaaaatgaggctaaagatagtaaagagccattaccagatacaggttctgaagatgaagcgaatacgtcactaatttggggattattagcatcattaggttcattactacttttcagaagaaaaaaagaaaataaagataagaaataagtaataatgatattaaattaatcatatgattcatgaagaagccaccttaaaaggtggcttttttacttggattttccaaatatattgtttgaatataattaataattaattcatcaacagttaattattttaaaaaggtagatgttatataatttggcttggcgaaaaaatagggtgtaaggtaggttgttaattagggaaaattaaggagaaaatacagttgaaaaataaattgctagttttatcattgggagcattatgtgtatcacaaatttgggaaagcaatcgtgcgagtgcagtggtttctggggagaagaatccatatgtatctgagtctttgaaactaaatgataacaaaagtaaaagcttatcattagaaaagtataaagagagtcttagaagtataatgtgtacaaaagaaatcaacaaaaatgatggatatgatgagcctgaatataaagaagcactggatacttacagaaaaaaattatttgctgagttagatgcacttaataaatttttagatgaagagagaaaaatagccagttacattaaaaaaaatatggaagtgccaagtaatattttaggattaacacacggtagatatacagcaatatataatgcaattaaagaaaataaaaaagaattcgaaaaaaatgtagaaaatattgaaagtaagcatcttgatttaaaaaggtttgatgaagacaaagattatgaagcaagagttaaattaaatgaattagaaaataaagttttaatgttaggtcaagcttttcctgataaagtagatgctagagaaagtctttataataaattggatatgattgttggtttagataatgatgaaattgaagaaagacatccgcaaaatgaaaggttattaaaaggaacgagttgaagatttagaaacaattatcgatgaattctttaatgacataggtgaaaataagaccggagaatatagcaccattaactaacaatgagcataaaaataaggaaatgattacaaagctaaaatctgacactgaagcagcaaaaagtgatgaatcaaaaagaagcaaaagaagtaaaagaagtttaaatactcaaaatcataaatctaaaataaacgaagtaactgcagaacaaaaagcagaatacgaaagaaaagctgaagaaagaaaagaaaagtttttagctaagaacaaagataatccagtggtttcactaatcgatgacgaagacgacaacgaaaacgaaaacgacaagcaacttgtggtttctgcaccaacaaataaaccaacaacactgcctacatacactgaaacaacgacacaggtaccaatgcctacagttgagcgtcaaactcagcaacaaatcgtttacaaagcaccaaaaccattagctggattaaatggtgaaagtcatgatttcacaacaacgcatcaatcaccaactacttcaaatcacacgcataatcatcttattgaaattgaagaaacatctgctttacctggtagaaagacgggttcattggttggtttgagtcaaattgattcttcacatttaactgaacgtgagaagcgcgtgattaagcgtgaacacgtgagagaagctcaaaagttagttgataattataaagatacacatagttataaagaccgattaaatgcacaacaaaaagtaaatactttaagtgcaggtcatcaaaaacgttttaataaacaaattaataaagtatataatggcaaataattaatgcatggctgcaaaacaaataatgagtttgccgtaaaaataacaacattttaaactagcaataaataatatcaaagtcatcatttcaatgatgcaatctagtatagtccacattctaaacaggtgtagactattacttttttcactttatattacgaaaaaattattatgcttaactatcaatatcaataattaattttaagctgaaaaacaataaaaatgttaagataacgtttacttcaagttaattattatactgaaaattctggtatataatgctgttagtgaatataacaggaaaattaaattggttataatattgagtctatataaaggagaaataacagatgaaaaagaaattattagttttaactatgagcacgctatttgctacacaaattatgaattcaaatcacgctaaagcatcagtgacagagagtgttgacaaaaactttgtagcttctgaagataaattgaataagattgcagatccatcggcagctagtaaaattgtagataaaaactttgccgtaccagaatcaaaattaggaaacattgtaccagagtataaagaaatcaataatcgagtgaatgtaacaacaaacaatccagcttcaaaacaagttgacaagcaaattgttgttaaaggcccagaggtgaatagatttattacgcaaaacaaagtaaaccaccacttcatcactacgcaaacacactacaagaaagttattacttcatacaaatcaacgcatgtacataatcatgtagaccatgcaacatcttctatccatcatcactttactattaaaccaacagaagcacctagatatacacacccatctcaatctcaatcgttaattataaatcatcattttgcagttcctggataccatggtcataaagttgtaacaccaggacaagctagtattagaattcatcacttttgtgctgtacctcaaataaatagttttaaggtcattccatcatatggtcacaattcacatcgtatgcatgtaccaagtttccaaaataacacaacagcaacacatcaaaatgcaaaagtaaataaaacttataactataaatatttttatacttataaagtagtcaaaggtgtaaaaaaacatttctcattttcaaaatcacatggttgtaaaattgttaaaccagcattaaacatcaaaaatgtaaattatcaatatgctgttccaagtaatagccctacacacgttgttcctgagtttaagggcatcttaccagcaccacgagtataaaaattgacattaagtttacgagatatgataaatacctattattttaaatatagtctgcaatctatgaggttgtaggctatgtttttgctgtttaacgatcaacacccatcaacaaattataccgtttttctactttaaaagttggaagtaacataatcttaaataaatatattattaattaagataaatataagactcaagattattgttaatagtttgttcatcgcaagttaattattgtttctaaaatattggtatataattttcaatggcgaagaaaacagggtgaaaaagtcggtttttaaatcaaagcaaataagggagcttaaacaattgaaaaggaaagtactagtattaacaatgggcgtactttgtgcgacacaattatggcaaacgaataatgcaaaagctttagtgcatgagagtggcgttaatgatactaagcaatttactgaagtaacatcggaagaaaaagttataacagttgaacatgcttatattaatatttttaaatctaatagcaattcaaacctgatggagttcaacatattaacaataggcggtaaatcaggagctatggttggttatagtgaaattgactcatcacatttcacagaccgtgacaaacgcgctattagacgtgatcatgttaaagaagcacaaagcttaattaacgattataaagatacacaaagctatgaagatctcgctaaggcaactgcaaaagtaagtacacttagtcagtctcaccaaaattatttaaataaacaaattgataaagtgaataataagatagagaaaactgaaaagcgctaatccaaagtaaattataagttatacatctcgtttttaaatgacaatttatccccgtaaatataataaataatcttttcacattccgcatagatatagagacgctaataaacctctttgtctcgatatgatagtctgcaacgattcatgttgtaggctttttaattttacaaatacgactaaatatttaagttctgacacctaaaatatagaaaatacataaaagtaagtatagttattttattataattattaaatttttattaattaattgtaaaaatgtagaattataattaattaacgtttaatattaaaattaactaaaaagaaagaggtgttagttatgacagaatacttattaagtgctggcatatgtatggcaattgtttcaatattacttatagggatggctatcagtaatgtttcgaaagaacaatacgcaaagaggtttttctttttcgctactagttgcttagtgttaactttagttgtagcttcaagtctaagtagctcagcaaatgcatcacaaacagataatggcgtaaatagaagtggttcagaagatccaacagtatatagtgcaacttcaactaaaaaattacataaagaacctgcgacattaattaaagcgattgatggtgatactgttaaattaatgtacaaaggtcaaccaatgacattcagactattattggttgatacacctgaaacaaagcatcctaaaaaaggtgtagagaaatatggtcctgaagcaagtgcatttacgaaaaaaatggtagaaaatgcaaagaaaattgaagtcgagtttgacaaaggtcaaagaactgataaatatggacgtggcttagcgtatatttatgctgatggaaaaatggtaaacgaagctttagttcgtcaaggcttggctaaagttgcttatgtttataaacctaacaatacacatgaacaacttttaagaaaaagtgaagcacaagcgaaaaaagagaaattaaatatttggagcgaagacaacgctgattcaggtcaataatgctcattgtaaaagtgtcactgctgctagtggcacttttacaatttttagatcacgttatgatttattatcaattcagaattaaaaaagtaaatagtatcaaaatcaagtgtatttaatattagaaaataaaaattttaaatttagtattaaaatggaatattactatatatttcaatgtgtattatcacagaaaataaaataatgctttacttctatatttaaaagtgtataatgaaagttaagtaataaagagcgtgaagaaaaatgtgagttatttatatagaatattctccttttcatttatgaatttgttacaaaatatttagtgcaaaagcacgacggaggtattcaatatgaataacggtacagttaaatggtttaatgcagaaaaaggttttggtttcatcgaaagagaagatggtagcgacgtattcgtacacttctcagcaatcgctgaagatggatacaaatcattagaagaaggccaaaaagttgaattcgacatcgttgaaggcgaccgtggcgagcaagctgcaaacgtagttaaaatgtaattttaacttattcaaacagtccttattatagggctgtttttttatgctttaaatcgatagcagttggtgtggtaaaagcactagctgttatttttttgtccaataaatttaggtggagatctaacaatatataatggttctaaaataaatcgaactgatggaaaagatttttacttttcatctgtccgacttttgattttgaatataaaaaaagcgccaatacagaactttaataatgacgagaattaaagtctgtatatggcgataacaagaagtaatgttaaacactcaaaatgtttaacaataataggataccacatcgcataatatcttactacttaattaataatttaactaatcaactttttgttaattttttattaagactgattaattattgagaatatttattgtttttaaaatctcataataattcagtaatcttgttttcatttaaaaagtggaacattaaaataattaaataaaaatattgcgtttaatttacagcgtcaaatatacttatttctaatgctttgaggtctacagaaacaagtagagaataatcgatgttactaatgttgccattctccaaatctatttctgtgagtatttggaagctaccattaggcaacggtttaacaatagacaattgcttttccgcttgttgtatcaaaaaaggtttagtagattgattattaatatgccattcactcatgtatattttcactcctgttttaaaatagggttagaaattttatagttgagacatccatgttcaaccaaaattttgttcaaattcaataaatgtcttgtttaaaatagaaatattgtaaatgttatcgtccaaaacttcaccagttaagtatttgttttgaattaaaatttggcagttagttaagaagtcttgataatcacgatcgcaaaaatagttttcacgtgcatttttagcatcgccaaaaaagttagcgactgtttctgtttctccattattcgaacgttcaatatataatttgtaaaatttagctattgtatacttttgttctttagttagttcattcaaaatattgggcctcctgaaatatcatttgtaatctatacccaatttattgcaaaacacaaactaatttaactttttgatgaaacagttttaataagttttaacaagccttagtttatatggatctataaaattatctttaattgcatagggtgaaataatatgtagtccataacttttaactgatttttcacttacaccaaatttataagcttgatagataattttagtacaatatgtaaattttttgctgttcaaatttaatgtaactagataacgatgatttgtattttcatagtttttcttaacccattcagccgcttttttacctgcaccaggatagctacaacgataaactttcatccaatcatttttgccacttgcataattatatttaaaagattcgaaggattgtgtagttggtttgtcgccaggcccctcaatttgtaaaatcgttttatcatcaatcgcgatactacaatgaccaaaaaatccccacatgacagggccttttgtaacaataatatcaccaggttgtaattggaatttgtcatcttgaatttctgaatacttattatctgcaattgtttttggtgagtttataggggatacgacaacgaataatataagtaaaattatcgttcgtttaatatagttcacttaaaagctccttgttgaagaaatatatgtaaatagtcttaaattagaattgtaatctttaataagcttgcaagactaaaacatatcttaaatattaaagtatgagagtgtgaaatgtctattaagaataaaaaacagtctgaaacatcattgagacgtttcagactggatataaaatgaatttcatttatagcacaccaaatataaatgtgtatattaatatagcgaatccaaaaatatagagaatgacagtgaaacttaaataggactcttttttagattctttgccagtttttttcattaatacgagtataaacgtagcggcaactaagaaaattaatgctagccaaaacagaattgcaaaatgtaaagacatgtgaaaccctccttgtataccgtaatattaacctataaaactataaaaaataggataaatgtaatagagaacgagtacgatatttataaaaaataatatttcacttaaccagtttttagttatcattgcaatggtaaaggatactatgagtatcacaccacaaatgataataccaggcaggagccaacataaatcatctaaatctttattatatgtgattaaaatattaaagataacaaaagtggtagtaataactatattgatagcatttaacaaaatgttattcatgactgacacctactagtataaaaatagcttcttaataaatatgataacactattttccaataggtaaataaaaagtatagttattttttaaaatattatttgtagaatgctaaagtttatctaattcaaacaagcgagcatatataggggtgtatagtactaattatgaaaagaatatttacatgctaaaaacccttaaagttgaataattcgttaatatttttagaatcagataacaaaaaaatgtgcaaaattacttttgcacatttacaaatactagttttctgataagattaataataacactttaaatagcgtttaataaatgaagggggcaagtcttatgacgttttacaatttcatcatgggttttcaaaatgataacacaccatttggtatattggccgaacacgttagtgaagataaagcattccctcgattagaagaaagacaccaagtaattagagcatatgtgatgtctaattacacagatcatcaattaattgaaactacaaatagagctattagcttatatatggcaaattaatttgagtagtaccaattatgatgtattagtgcatcccaaatatcttttgttttaaagtttatttcatcatttcttatcgaaaatggtgtaataatgtctttatctaaccaagtgtttataagttcatttggtacaccatctaacaacatttcacttttactaattataaaacattcccagtcaagtgaaacattttgtggattcacataattacattgattatgattatccataaacactcactcctttaaaattctgtactcttcattgcgttttaccccgtcacattatcttttaaactaaaatcatcattacttatgaaaaaaatgttcatcaaaagcaaaggttttcgctaccgaaaaagtttaaataatggtttaatatatttggtactcattttaataaaaagagaatacattttgagctatcaatactttttattgaagaggtgttattgttggctaaaacgttatatttaatgcgccacggacaaactttgtttaattttaagggactaattcagggatttggagattcgccgctaacagaacttggaattgctcaagctcaaaaggcacgtagttattatgaaactaaggggataaacttcgatttatatgcatcatcaacgcaagaacgcgcaagtgacacacttgaaaatgttgcacctaatcaatcgtatcaacgttttaagggactgaaggaatggcattttggattatttgaaggtgagtcagtctatctatttgataatctatacaagcctgaggacttattcggagatcgaattgttcctttcaaaggagaggcaaggcaacaagttgaagatcgcattgtgaaaactttacatgacattatgtctcaaacaaagaataatgcattagcgtgagtcatggaacaataatgggagtatttttaagatattgccttaaactagatgaagcattaaagcataatattggtaattgtaatatcttgaaatttgaatatgacaatggaacatttaaatttgttgagttaattgatccaaatttataataaataaagcgttatacatagacacaagtatgtcttttgtataacgcttttaaaatactactatataacgctttagaatattaattgaataagtttttgcaatatcatcagagcaacaataataattattatgcttgatattttattgattattgttaataattttcctgttttatcaattgatccaactatttttcctaaaattgcgagtaaaaagaaccataaccatgaaacgctaatacaagcgattgtgaacgcaattttattgctgccactatataatgcagcactactaccaattacgccaattgtatctaaaatagcatgtggattgagtaatgaaactgataaagcaaaacttacttgtttcattggagacataatttgagcttctccatctgttgagggtttatcatgccaaatggtccaagccatatacatcaagaaaattaaaccaattacataaataattgcttgaagtacaggtaaagacataataatgatagatactcctaccactgcaataataataagtaagctgtctgacaacccggctgtaattattgcaggcaatacatatctatattttggttgattagctccttggttaaaaataaatacattttgtgcacctaaaggtaaaattagaccaatcgctaagataaatccatgaataattgcggttaccattaagttttgacacccctaaaacatagaatattctgaaaaaacttattgatatcataccaaataaaaaacaactactcaatagtagagtagttgtatgaaaaatagattgatttgaatttatgagaaatgtagaatatataaaactgtattacttattaatcaaatcataaaaaagccaatgttcatcgaaataggtatttccgattttaattgcatttttctcaaaaccaagaatgtcgaatcctagtgcactatagaaaactttagcacctatgttgtttgacacaattgatgtaagtaaagattcgtaattgttctgccgtgcataattaataatgaaattaatgagctcgctattaatcgatttatcgttattagtaacaaagttgtatttaattaatgatttatgttcttttccaacgtatcgaatttgttctaaggcagctgttgcgataagtgcttcgttttcataacagccaaatacaatacatttcggtgaaccttgatttaaaatgtcgtgtattaaggtgtcagtcattgtttgactataatgtgaatcttgagtgaattcttcattgactgtcgaaacaagtctcttatactcattaaaatcattattcgttaatgttttaatttcaatcattactgacctccttaatcattattaagaaagattttgtactaaaaaaatttcttaattacatattaaaatgtttattaaaattttgcaatcattgatttatatgcacattcttgtaaatggattatcaatttaattatatttatttttaagttcagggaattatggaattggttattggtcgacactggacttttatttgtagacggtatgcgaagaagtcaagccagtattggaaccggtcacatttatgatgactaagggacaatcattttcagttaaatattgctagaaatttcaatcgcgattagaaaaaataaccaaccaaaaatttttggttggcaaatttgaattttatgtgaattttattaataacgttgaataatcactttaagttaatgttaatctacaacatttacaattaaatcgacattaatatttccttgagtcgcttttgaatatggacaaaattcatgagccatttgtaaatatttttcagcttcttcttgagatataacatttttaattgtcgcatcaattgaaacacttaatttaggactttctgagtctggatcatcttctagtctcactgttagtgttacttctggatgagcatcacgcactttgttttgctttaaaattaggtcgaaggcaccgttgaagcaagatgcataacctgctgcaaataattgttcggggttagtagctttaccatctgcttgagcaggcggaacgatatcaatatctattgctcgatcatcagtataaacatgtcctttacgtccgccaacatttgtcgctttagtttcataatgtattgccattcttataacctcctaatttaaaatacatttatgctttacccattcgaaaataccttaatcatattcatttatagcattgtttgattgaaggataaaaagttgttgtttacaataaaaataatgagtatctgaaatgagggatttactatgacacatgtggaagtagtagcgactatcgcgccacaattatatatcgaagaaactttaattcaaaaaattaatcatcgtattgatgcaatagacgtattagaattacgaattgatcaaattgaaaatgtcacagttgatcaagtggcagaaatgattacaaagctgaaggttatgcaagattcatttaaattattagttacgtatcgtacaaagttacaaggtggctatgggcaatttacaaatgactcgtatcttaatttaatatcggacttagcaaatatcaatggcatagatatgattgatatagaatggcaagcagatattgacattgaaaaacatcaacgaatcattacacatttgcaacagtataataaagaggtgattatatcacatcataatttcgaaagtacgcctccattagatgaattgcaatttatattttttaaaatgcaaaagttcaacccagaatacgttaaattagcagtaatgccacataataaaaatgatgtgttaaatttattgcagtcaatgtctacattttcagatactatggactgcaaagttgttggtatttcaatgtctaaacttggactaataagtagaacggctcaaggcgtttttggtggtgcgttgacttatggttgtatcggagaaccacaagctccaggacagattgatgttactgatttaaaagcacaagtgactttatactaataaaatgaattaggttgcttttgtgtaagtgctgtcttataattgagaagtattatcattgttcgtggaggagcgattttagatggaattacaacaagcaatagctaatagaagaagtgtgaaaaaatttaaaagagatatgcacatagatgacgcattgctatatcaagcaattgagaaagctgctgatgctccaaatcacggaatgagggaaccatggagagttgtgcatgttccgaaagacagattaggagatatgagtaaggatatttctaaatttgcatttcctaatgaattagataagcaacaatgtcattatgatgcagtaacgaaactaggtggcatgttattgcttattttaaaaacagatccaagacaacgtcaaaatgatgaaaactactttgcatttggtgcatatgcacaaaatccttatgttgttactttatgaagtgggaataggtacatgttggaaatcgccattatatatctatgatcctaaagtaagaaaaacacttggtataaagaaagacgaagttcttgctggattcttatatttaacggatttagaagaagatatgcctaaagcaccacgtaaaaatagaaacttaattacattatattaatatgtataattatagaaacattaataaaagctgagtcatgaattgaaggacatctatcgagttagagatttaatctaacttactagagtcggtacaatcacagtctcagctttttattgtgcagtatatacacatttgtattttagtatttatttaaaagtttctgctaaaaatgattcaacttgttcaggtgacttagcatttgctgaatgaaggtgtgcaattttgtcgccgtttttaaatactagcaagctagggatacccataacttcattttcaacaactacatcttctaattcatcacgattaacagtataccattggtaatcattatattgttctacgattgggtcaatccataaatccatagcacgacagtctgggcaccatcctgcctcaaatttaacaattacaggtgtatcgctattaattacagatttaaatgattcattacttttgattgcttgcattgtaacaactcctctagatagtttaataatttttattatagctaaatttatatcataataaaaaattttagcttcaaaatgaaagccttttgctatggaaaatgatatatttattttaaatacataaaggaggttgcagacgtatgattaaattttaccaatataagaattgtacaacttgtaaaaaggcagcaaagtttttagatgaatatggtgtaagttatgaaccaattgatatcgttcaacatacacctacaataaatgaatttaaaacaataattgcaaatacaggcgtagaaattaataaattgtttaatacacacggcgcgaaatatcgtgagcttgatttgaaaaataaattacaaactttatcagatgatgaaaagttagagttgttatcatctgatggtatgttagtaaagcgtcctctagcagtaatgggcgataagataacattaggatttaaagaagatcaatataaagagacttggttagcgtaagcataatgtaaacgtttactaaatatctcgatatttagattcattacatgtaaaatgaaataagctatacaattgttaatttttataaatatagttgaatagcatctagccttatggcatcattaatgatgtaaagattaattaggaggggattctcttggcagtaccaaatgaattgaaatattcaaaagagcatgaatgggttaaagttgaaggtaatgtagcaacaattggaatcacagaatacgcacaaagcgagttaggtgatattgtttttgttgaattaccagaaacagatgatgaaattaatgaaggggatacgtttggtagcgtagaatcagttaaaactgtatcagaattatatgcaccaatctctggtaaagtagttgaagtcaacgaagaactagaagatagtcccgaatttgtaaatgaatctccatacgaaaaagcatggatggtaaaagtagaagttagtgatgaaagtcagcttgaagcattattatcagctgaaaaatacgcagaaatgattggtgaataatcaccgtgtaactccttaatctaagattgaggagtttatttttagtctgagtaagtaaataaatatgaaagaaaatttattaggtactattatttggagtattgctacattttattattcaagaatgatgaaaataatgaatttagctattttaaaaataaaaattgggggaagttaatatgctaaacattcaagacgttagtcatctttctaaaaaggagcaaaaagcatataaccgtttcgtagaatctgtagaaaacggtaatttaccaatactaccatgtattgaaatggatctaaaagagatgcaagaagaaacattaaaccagagtaagattggtggaatgccatttttaaaatcttttaaagatataccattagatgaaaataatgtaccaatggtattgctagcacagattaatttggatgatcttccagaacaacaagaattatttcctgtaaatgaagggatattgcagttttggattagttcagaagatcaaatgtatggtatgtctgaaaatttaaagggaaacaatataaactcaaggcttgtttatataaaagagccaatttcagatttatcactcaaagatattcaagcgcatttgaagtcattaaatgctgataatgaggatatcccgttcagtggagcattttctatagaatttagattgtcgaaacaaactattacatgtactgattataagtacgatgaggacgtgcttgcattgtggaataaagtcaatccatccttcgcgctaaaatcaatgtttggtggatatgatgaattaatggaacctgtgtgtaacacatttactgctaaggaaccatttaatcaacttggtggttatccatattttgaccaaatagatccaagaacgaacgatcaaggactgaaaatgtatgatagagtcttactgcaaattgattctacaagagatggtaattcttcgataatatggggtgatttaggtattgccaatatcttagtaaaatctactgaccttgaggctatgaagtttgatgattacatgtattcatgggattgcagctaagagaatcataaaaatatattactttaataagatgtagtatttataggtcaatctagggagtgggacagaaatgataaagagccactaatgatttattatgtagtggttcttacacattagccacagctaatgtgtacttaaaaataggaatacatgagtaaaactcatgcataagaaatactaatttcaatagaaaaagtatttctttatcgtcgtcccaccccaacttgcattgtctgtagaaattgggaatccaatttctctgtgttggggccccgccaacttgcattgtctgtagaaattaggaatccaatttctctgtgttggggccccgccaacttgcattgtctgtagaatttcttttcgaaattctctatgttggggcccaccccaacttgcacattattgtaagctgacttaccgtcagcttctatgttggggccccgctataattgaaaaatgcttgttataggtgtattttcttttggttaactattggtaatatatcattgtagattttaggatgttgatttatggtttagcctttgtctgtttatgtaaaatgtcccagctagtcaaacattgagtttgtaattattatattaagctagtttaaattttttgtgatttatgttttattcataccaattttgtgaaatgatacagtgacagatgtttattgattttaaagggtgatgatgatggctattgtaaataaagtgataattgttgaaggaaaatctgataaaaaaagggtgcaacaggttattgcagaaccagtcaatattatttgtactcatggaacaatgagtatagataagtttgatgatatgatagaatcactatatgataaacaagtttttgtattagccgattctgatgacgaaggagatcgaattagaaattggtttaaacgttatttgagtgaaagtgaacatatatttattgataaaacttactgccaagttgcgaattgccccaaacaatatttggcgcatgtactttcaaaacatggctttacttgtaagaaagaaacacctttcttaccgaatataaataatgaaaggttagttttagtaaatgaataattcattagacatcaaagatgtaactacattttatgaggaagacaaacatttaatctttggttatacaccaacttgtggtacttgtaaggtttcagaaagaatgttagacattgctaatgaaatattgcagttgccattattgaaaatagatttaaacttttatcctcagttttgtaaagatatgcaaatcatgtctacgccgattttattgttgatgaataaagataaagaagtaaaacgaatttatgcatttcaatcggtgactgatttgttagaaaatttaaaatagttattgacgaaattttactaaggtgttaggattaatacaaattaaatgatgcgtaaactcttatcgagagtggtggagggatgtgccctacgaagcccggcaaccgtcttatatagaaatggtgccaattcacataaagttttaacttttgaagatgagagaaacaatactactattgctttctcaatttttctatcgatattgagaaagcattttttattttattaagcaacacagggaggaatcaacgtgattgaattaaaagaagttgttaaagaatatcggactaaaaataaagaagtccttgctgtagatcacgttaatttatcgattcgagcaggatcgatttatggcgtcattggtttttctggagcaggaaaaagtactttgattcgaatgtttaatcatctagaagcgcctacatcaggtgaagttattatagatggagaccatataggccaattgtccaaaaatggattaagagcaaaaagacaaaaagtaagtatgattttccaacattttaatttgttatggtcaaggactgtgttaaaaaatattatgtttccgcttgaaattgcaggtgtccctagaaggagagcaaagcaaaaagcattagaacttgtcgaactcgtcggtttaaaaggtagagaaaaggcttatccatcagagttatcaggtggacaaaagcaacgtgttgggattgcacgagcgttagctaatgatccaactgtcttgctttgtgatgaggcaacaagtgcacttgatccgcaaacaacagatgaaattttagatctactactaaaaattagagaacaacaaaatttaacaattgtactaattacgcatgaaatgcatgtcattcgtcgtatttgtgatgaagttgcagttatggaaagtggtaaagtgatagaacatggaccggtgacacaggtttttgaaaatccgcaacacactgtgacaaaacgatttgtgaaagaagatttaaacgatgatttcgaaacatctttaacagaattagagccattagaaaaagatgcttatatcgttagattagttttcgctggttcaacaacaaccgagcctattgtatcgagtctatcaactgcctatgatattaaaattaatattttagaagcaaatattaaaaatacaaaaaatggaacagtcggctttttagttctgcatattccatatatttcaagtgtagatttcggaaaattcgaaaaagagttaattgagcgacaagttaaaatggaggtgttaagacatgggtaaatcatttagtgaaattataaatgaaatgattacaatgcctaatattcagtggccagaagtttggactgcaatagtcgaaacactatacatgacagtcgtctcaactatatttgcatttatactcggtcttattttaggtgtgttattattcttgtctgctaaaggtaagtctatcggtgcaaggttattttattctatcgtttctttcattgttaacttatttagagcgataccatttattattttaattttattattaataccatttacaagtttgatacttggaacgataagtggtccgacaggtgcgttaccagccttgatcattggcgcagcgccgttttatgcaaggctcgtagaaattgcttttaaagaaattgataaaggtgtcatcgaagcggcctggtcaatgggggctaatacttggacagtaattcgtaaagtcctcttacctgaagccatgccagcgctagtgtctggcattacagttacagcaatcgctttagttggttcaacggcagttgcaggtgtaattggtgccggtggtttaggaaatttagcatacttaacaggtttcactcgaaatcaaaatgatgtcattttagtatcaacagtttttattttaattattgtatttataatccaattcattggggattggcttacaaataaacttgataaacgataaattgggggtttcattttatgaaaaaattatttggtcttattttagtattaacatttgcagttgtattagcagcttgcggtaatggaagcaaaagtggcagtgacgacaagaaaataacagtaggtgcttcaccagcaccacatgctgaaattttagaaaaagcaaaaccattattagagaaaaaaggttatgaactagatattaaaacaattaacgattacactacgcctaataaattactagacaaaggtgaaattgacgcaaactatttccaacatacaccatatttaaacacagagaaaaaggataaaggttacaaaatcgtaagtgccggtaatgttcacttagaacctatggctgtatactctaaaaagtataaaagtttaaaagaattaccaaaaggtgcaacagtttatgtgtctaataatccagctgaacaaggacgcttcttaaaattcttcgttgatgcaggtttaattaagatcaaaaaaggcgtaaaaattgaagatgctaagtttagtgatattacagagaataaaaaagatattaagtttaataataaacaatcagcagaattcttacctaaaatttatcaaaatgaagacgcggatgctgttatcattaattcaaactttgcaatcgaacaaaaactaaatcctaaaaaagattctattgctgtagaaagtgcgaaagataatccttatgcaaacttaattgctgttaaagaaggacatcaagatgataagaaaatcaaagcattaattgaagtattacaatctaaagatattcaagacttcattaatgaaaaatacaacggtgcagttattcctgctaaataatttttagttagagctcattgactgatatgctcccatcaaagtagacattgaaaaaatgcaaactttgatgggagttttttaaattagaatcaatatgaaatgtggaagatttaatatgataagagatgaataactatatataaatgattatcaagtcattatatataaagtgaaggcctatatgcttctgtgatttcaatcaatgtccatagatttacaatgttatataagcagttgttgattgaatgaaaatacgattgtaacaacctttttacaataattgcgggtccccaacacagaggatttcgaaaagaaattttataaacagtgcaagttggggttgggcccaacatagaagctgatggaaagccagtatacaataattgcggggccccaacatagtagcaggcggaaagccagcaaacaataatgtggaagttggggtgggacgacgataaagaaatactttttctatagaaattagtatttcttatgcatgagttttactcatgtattcctatttttaagtacacattagctgtggctaatgtgtaagaaccactacataataaatcattagtggctctttatcatttctgtcccactcccaagaaccaatacataataaagcataagtgattctttatcatttctctcccactccctcaagttaatgatgaatctatttcgctagttataaaatgacgtcaaatcaatatcaaaaattatttaagtaaaatgtttagataatttttcagtgggtaagtattatatataacatttaattattccgaggaggcatttattatggcagacgaaagtaaatttgaacaagcaaaaggtaatgttaaagaaacagtaggtaatgttactgataataaaaatttagaaaacgaaggtaaagaagataaagcttctggtaaagcgaaagaattcgttgaaaatgcaaaagaaaaagcaactgattttattgataaagtaaaaggtaacaaaggcgagtaattttactttttattcctaatacactgcacatgccacttagtcggtataaccatcggctaggtggttttttgtattaaaaaagtggacaccaaaatttattaataattattttaatgttagaaaaaaactaaataaaaactcgctaatgatatccaataatatgtatacaaaacgagacatatattgcatatgattaacgagatactgaatatattttatcacccctaaaatgattattcattttcagcggtaattcgacctaaagtcaaacttacaataaaaccgatgataaatactactaatgaaacgaaccacatcacgatattagttggtaaacctggaaatactgcaaagagggagccaacaacaaaaccaatgattaatgcaaaagtcattagtttatgatgtgttaggaaatactggataattttacttgaaataatgaatccagcaagcacgccaaatccgactgcaagtaatataggaagaccggcaaagttaagtttaacaaattcagatattgctagcatgaccgtaccatagacgccaaatactaataacataaatgaccctgaaatacctgggagtaacatagcactagatgcacacatacctgcaataaagtatttaataataagaccagttgatagagtaagtgtttctccagcatgtttatcgccattattcattaatgtaataacaattaagatagcgataccagctataaccatcatgtaatgtttagttgtaaatgacgttttatagttagaaattttcaataaatatggaacgataccaatgattaatccaccaaagaaaaacatagttggaatatggtgttggcttaataaataattaaaaagattacttagtgatcccattgccagtaacattccaattataatagggattaaaaatgtaaaacttggccaaaaacgtcgtgagaatatgccactaattgaagcgataaattgattgtatatacctaacaataatgcaatagtcccaccgctaacaccaggtaccaagtcactcgttcccatagcaaaaccttttagaatattaatccatttaaattgttgcatgaataactcctttcaaacgattggaataaaatcataaatagcatcataccatattacaaatgtcctagtgaaatgataacatattttaaattcataaaatccattgagaaattatgtgcacttattatcatttatatttttaaagagagcggattagagttgtactttagagttattaaaaataataaaaagggtttaagttgtttatattaaggtataagtaagttataattaactgaacgcattattacaaagtctttttgactacaaattaaaattattataaactagttaagaaaactttatattttacggagggaatataaaatggcatcaacattagaaatcaaagacctacatgtgtctattgaggataaagaaatcttaaaaggtgttaacttgacaattaacactgatgaaatacatgcgattatgggaccaaacgggacaggtaaatcaactttatcatctgcaattatgggacacccaagctatgaagtaactaaaggagaagtacttttagacggtgtaaacattttagaattagaagttgatgaaagagcaaaagcaggattattcttggcaatgcagtatccatcagaaattacaggtgttacaaatgctgatttcatgcgttcagcaatcaatgcgaaacgtgaagaaggacaagaaatcaacttaatgcaatttattaagaaattagataaaaatatggattttctagacatagataaagacatggcacaacgttatttaaatgaaggtttctcaggtggagagaagaaacgtaacgaaatcttacaattaatgatgttagaacctaagtttgcaatcttagatgaaatcgattcaggattagacatcgatgcattaaaagttgtatctaaaggtattaaccaaatgcgtggggaaaactttggtgcattaatgatcacacactatcaacgattattaaattacattactcctgataaagtacatgtaatgtatgctggtaaagtcgttaaatctggtggtccagaattagcaaaacgtcttgaagaagaaggatatgaatgggttaaagaagagttcggttcagctgaataatcttaattaatacagtatccatgagatgttcatctatatatgatgaaaatgaacatttatacgaaatagtaaatttcatcaagtaggaggaaaaagttatgacaactgatattttgaacatttctgaagaacaacttgttgattattctaaagcccacaatgaaccttcttggatgacagaattacgtaaaaaagctttgaaattaacagaaactttagaaatgccaaaacctgataaaacaaaattaagaaaatgggattttgattcttttaaacaacacgatgtaaaaggtgatgtttatcaatctttatcacaattacctgagtcagtaagagaaattattgacgtagatcattctaaaaacttagtaattcaacataataatacgattgcgtacacacaagttgatgataatgcatcgaaagatggcgttatcgttgaaggtttagcagacgctcttatgaaccatagtgatttagtacaaaagtactttatgaaagatgcggtaacagtagatgaacatcgtatcacagcgctacacacggcattagttaatggtggcgtatttgtttatgttcctaaaaatgtagttgtagaacatccagtacaatacgttgtgttgcacgacgacgaaaatgcaagcttttataaccatgttatcatcgttactgaagaaagcgccgaagtcacatatgttgaaaattacttatcaaatgcatctggtgaaggaaatcaattaaatattatttctgaagtgattgctggtgcaaattcaaatatcacatatggctcagtagactatatggataaaggctttacaggtcatatcattcgacgtggtattactgaagcggatgcctcaattaattgggcattaggtttaatgaatgagggtagccaaattattgataatacaacaaatttatttggtgatcgttcaactagttcacttaaatcagtagttgtaggtacaggcgaacaaaaaattaatctaacatctaaaatcgtacaatatggtaaagaaacagatggttatatccttaaacatggtgttatgaaagaacatgcatcatctgtatttaatggtatcggctacattaagcatggtggaactaaatcaattgctaatcaggaatcacgtgtattaatgttatctgaacatgctcgtggtgacgcgaatcctattttattaattgatgaagatgatgtacaagctggtcatgctgcatcagtaggtcgtgttgatccagatcaactttactatttaatgagtcgtggtatttctcaaagagaagcggaacgtcttgttatacatggtttcttagatccagtagtacgtgaattacctatcgaagacgttaaacgtcaattgagagaagtaattgaacgcaaagtttcttaaattaatattttgaaaataaaagtttgtaatagaatatagactgtcgatattggtataagactaaaccaacgtcagtatttaaatgattaggatttttatttaagaaaggtcgtgaatgaagtggccgaacactcatttgacgttaatgaagtaatcaaggattttccgatattagatcaaaaagtcaatggcaaacgtttagcatatcttgattcaacagcgacaagtcaaacgcctgtgcaagtgttaaatgttttagaggattactacaagcgttataattcaaacgttcatcgtggtgttcatacattaggatcattggcaactgatggttatgaaaatgcacgtgaaaccgttcgtcgttttattaatgcgaagtattttgaagaaatcattttcacacgcggaacaactgcatcgattaaccttgtagcacatagttatggtgatgcaaatgttgaagagggcgatgaaattgttgtcactgaaatggaacatcatgccaatattgttccttggcaacagttagcaaagcgtaaaaatgcgacattgaaatttataccaatgacagctgacggtgaattaaacatcgaagatattaagcaaacgattaatgataaaacaaagatcgttgctattgcacatatttctaatgtactcggtacaattaatgatgttaaaaccattgcagaaatagctcatcaacatggtgcaattatcagtgttgatggggcgcaagcagcaccacatatgaaacttgatatgcaagaaatgaatgctgatttttatagttttagtggacataaaatgcttggaccaacaggtattggcgtattatttggtaaacgtgagttactacaaaaaatggaaccgattgagttcggtggcgacatgattgattttgtaagtaagtatgatgcaacatgggctgatttacctactaaatttgaggcgggtactccattaattgctcaagcaattgggcttgcagaagctattcgctatttagaacgcataggttttgatgcaattcataaatatgaacaagaattaacgatatatgcttatgagcaaatgtctacaattgaaggaattgaaatttatggcccgccaaaggatcgtcgtgcaggtgtaataacgtttaatttacaagatgtacatccacacgatgttgctacagccgtagatacagaaggtgtagcggttagagctgggcatcattgtgcgcaaccgttaatgaaatggttaaatgtgtcttcaacagctagagcgagtttttatatatacaacacgaaagaagacattgatcagttaataaatgccttgaaacaaacgaaggagtttttctcttatgaattttaataatctagatcaattatatagatctgtcattatggatcattataaaaatcctagaaataaaggtgtattagataacgggtctatgacagtagatatgaataacccgacatgcggtgaccgtatacgactaacatttgatatagaagacggcattataaaagatgctaagtttgaaggtgaaggttgttcgatttcaatggcaagtgcatcgatgatgacacaagctgttaaaggtcattcacttggagaagcaatgcaaatgagccaagaatttacgaaaatgatgcttggtgaagactatgtgattacagaagaaatgggagatattgaagcattgcaaggtgtatcacaattcccagctcgtattaaatgtgccacattagcttggaaagcattggaaaaaggtactgttgctaaagaaggtaaagcagaaggtacgactgaagaagaatagaatgctgttaatcatagatgattttgatattagacatataatagtaaaaaaatttttaaatgatgtcatgtcattgttataatatggtttacatcatgaattaaaaacttacgcacgccgttgtaaatatatttttaaggagtgattgaaatggctaaaaaagcacctgatgttggggattataaatatggattccacgacgatgatgtgtccattttcagatcagaacgtggtttaactgagaatatcgttagagaaatttctaacatgaaaaatgagccggaatggatgttagatttccgtcttaaatcattaaaattgttttataaaatgccaatgcctcaatggggtggcgacttatcagaattgaatttcgatgacattacttactatgtaaagccttcagaacaagctgaacgttcatgggatgaagtacctgaagaaattaaaagaactttcgataaattaggaattcctgaagctgaacaaaaatatttagctggtgtttctgctcaatatgaatctgaagttgtttaccataatatggaaaaagaacttgaagaaaaaggtattatctttaaagatactgatagtgctttacaagaaaatgaagaattattcaaaaaatactttgcttctgtagtacctgcagcagataacaaatttgcggcgttaaactcagcagtatggtcaggtggttcgttcatttatgtacctaaaaatatcaaactagatacgccactacaagcttatttccgtattaactctgagaacatgggtcaatttgaacgtacattaatcattgctgatgaaggtgcttctgtacattacgtagaaggttgtactgcaccagtttatacaactagttctttacactctgctgttgtggaaatcattgtgcataaagatgcgcacgttcgttatactacgattcaaaactgggcgaacaatgtatacaatttagttacgaaacgtacttttgtttatgaaaacggaaatatggaatgggtagatggtaacttaggttctaagttaacgatgaaatatccaaactgtgttcttttaggtgaaggtgcaaaaggtagtacattatctattgcatttgctggtaaaggacaagttcaagatgccggtgctaaaatgattcataaagcgccaaatacatcttcaacgattgtttctaaatctatttctaaaaatggtggtaaagttatttatcgcggtattgttcattttggacgtaaagcaaaaggcgctcgttcaaatattgaatgtgatacattaatcttagataacgaatcaacatcagatacaattccatataatgaagtattcaacgatcaaatatcattagaacatgaagccaaggtttcaaaagtttctgaagaacaattattctatctaatgagtcgtggtatttctgaagaagaagcgacagaaatgattgttatgggattcatcgaaccatttacaaaagaacttccaatggaatacgcggtcgaaatgaaccgtttaatcaagttcgaaatggaaggtagtattggatagctttaaaccgcgttgttaagccattcttaactgtcgaaaacggttattgataccattttgatactgaatataacaaaaagccacattactgtggctttttttgttttataactaaatcggattgatagataagctttgtacttatttatatcagtccgattttttgattggtgtaaaaaataatcattgatggtagataaagcgacaacataaatacaacatgattgtggcattagagtgctggtctttattaaattaattgaaaactacatcaaatatcctttaaagataattcgataatagttcgattaagtttcgttgtataagtgagttaaaataagaaaactattaataaaattaagttcactacagatgttgctaatggaccgtaagttttaaagacatcattacttttataaccaacaatcgcatctaaaaattgaactaaaatcattgcaatggatatagttatcaaaaatatagcactatgaatgactaaagaaaaaatagctaataaaaataaaggtaagcttcgactaagtgcataatatgcatttatattatggctagatgcacatgcttgaattgaataacctaaacttacactggcactaatgattgtaaatattgctaaaacaaaatacatgttaatccttctttctatatttgaatatctgtaaacaagtacttgtctaaagatatttaaaagatgattagaataaatttatgagaaacttgttgttatcattatagcggtttcaaatcattataactctgtcataaactgaatttgttgaaatttttcattatgtaaatttattcgtaacaatcaggtcgaactatagcatcattttactaatgaatgcattaaagtaactatgattaaaaatgcatattaattatcattattaagtctattatatataatgaattttaactggtttattaaacgagaacgtcgggaattaggtaactacaataaaaataagatatgacaataaggagactacacgcgtgatcattgccataattatattgatatttatttcgtttttcttttcaggaagcgagacggcattaacggctgccaataaaacaaaatttaaaactgaagctgacaaaggtgataaaaaagcaaaaggcattgtaaagttacttgaaaaaccaagtgagtttattacaacgattctaattgggaataatgtcgcgaatattttattaccaacacttgttacaattatggctttacgttgggggattagcgttgggattgcatcagctgttttaacagttgttatcattttgatttccgaagtgattcccaagtctgtcgctgcaacatttccagataaaataacaaggcttgtatatccaattattaatatttgtgtaattgtgttccgtcctatcacattacttttaaataagttgacggacagtattaatcgatgtttatctaagggccaacctcaagaacatcaattttcaaaagaagaatttaaaacaatgttagcaattgctggacatgaaggtgctttaaatgaaattgagacgagtaggttggaaggtgtcattaattttgaaaatttaaaagtaaaagatgttgatacaacacctagaattaatgtgacggcatttgcttcaaatgcgacatacgaagaagtttatgaaacggttatgaataagccatacactaggtatccagtgtacgagggagatattgataacattattggagtgtttcattctaaatatctgttggcttggagtaataaaaaagaagatcaaattacaaactattcagctaagccattatttgtgaatgaacacaataaagctgaatgggtattacgtaagatgactatttctagaaaacatttagcaattgtgttggacgaatttggtggtactgaagcgatagtgtcacatgaagacttaatcgaagaattattaggtatggaaattgaagatgagatggataaaaaggaaaaagaaaaactttctcaacagcaaattcaatttcaacaacggaaaaatcgcaacgtatctatataaggagcaaacagctatgtggaataagaatcgacttactcaaatgttaagtattgaatttccaattatacaagcaggtatggcaggaagtacgacaccgaaattagttgcatcagtaagtaacagtggtggattaggcacaataggcgcaggttactttaatacgcagcaattagaagacgaaatagattatgtacgccaattaacgtcaaattcttttggtgtaaacgtctttgtaccaagtcaacaatcatataccagtaatcaaattgaaaatatgaatgcatggctaaaaccttatcgacgcgcattacatttagaagagccggttgtaaaaattaccgaagaacaacaatttaagtgtcatattgatacgataattaaaaagcaagtgcctgtatgttgttttacttttggaattccaaatgaatctattataaaaagattgaaagaagcaaacattaagctaataggtacagcaacaagtgttgatgaggctattgcgaatgaaaaagcaggtatggatgctatcgttgctcaaggtagtgaagcaggtggacatcgtggttcatttttaaaacctaaaaatcaattacctatggttggaacaatatctttagtgccacaaattgtagatgtcgtttcaattccggtcattgccgctggtggaattatggacggtagaggagttttggcaagtattgtcttaggtgcagaaggggtacaaatgggcaccgcatttttaacatcacaagatagtaatgcatcagaactactgcgagatgcaattataaatagtaaagaaacagatacagtcattacaaaagcgtttagtggaaagcttgcacgcggtatcaacaataggtttatcgaagaaatgtcccaatacgaaggcgatatcccagattatccaatacaaaatgagctaacaagtagcataagaaaagccgcagcaaacatcggcgacaaagagttaacacatatgtggagtggacaaagcccgcgactagcaacaacgcatcccgccaacaccatcatgtccaatataatcaatcaaattaatcaaatcatgcaatataaataatcgaccgcaatccacaaaagcacaagcacccccaaacattattttagtgcttgccatttttgtggattgcgtttctattttaccaatctaatcaaacgaaattatcgagctgaaggtcaccgaaatgattataatcaaacgaaattatcgagctaaagttcactgaaatgtttatgatcaaacgaaattatcgagctaaagttcactgaaatgtttatgatcaaacgaaattatcgagctaaagttcgctgaaatgattatgatcaaacgaaattatcaaactaaagttcgctgaaatgattatgataaaagttatatggtatgatgacattggtgatatatatgataaacatcggattaacaggttggggtgatcactattcattatatgaagatttagaacgccaaaccgataaacttaaaacatatgctggacattttccggttgtcgaattagatgcgacatactatgcgatacaaccggaaagaaatatattgaaatggataaaagaaacgcctgatacatttgaatttgtggtcaaaattcatcaagcactcacattgcatgcagactacaaaacatttgcagatacaaggcaagaactatttgatcaatttaagaatatgttagagcccttacatacacagaaaaaattagcaatggtattggttcaatttcctccatggtttgactgcaatgcacaaaatatcaaatatattttgtatgtaagacagcaattacaatcatttccaatgtgtgtagaatttaggcatcaatcatggtttagtgatgcatttaaagaacaaacattgtcatttttaacagagcatcaaatcattcatgcagtagttgatgaaccacaagtgaaagatggcagtgtacctttagtcaatcgaatcacaaatgaaattgcgtttgtacgttatcatggacgtaatcattacggttggactaagaaagatatgtcagatcaagaatggcgagatgtacgctatttatatgattataatgagcaagaattaatagacttggcacaaaaggcacaaatattagcacaaaaagctaagaaagtttacgtcatatttaacaataattctggtggtcatgcagcaaataatgccaaaacatatcagcgattattgaatatagaatatgaagggttagcaccacaacaattaaaattattttaagaggcgacgactatgttattaacaattacattattagttttaatcggaggtttgtcagcgattatagggtcaatcgtaggcattggaggcggtattattatcgttccaacaatggtttacctcggtgttgaacatggattactacataatattacaacacaagtagcgatagggacgtcttcagtcattctaattgtgacaggactttcttcatcacttggatatctaaaaacaaaacaagttgatattaaaaatggctctatctttttatttggattattaccaggttcattgcttgggtcctttattagtagatatttaacatttgagtcatttaatttatattttggtatctttttaattttcgtagccattttattaatggtaagaaataagattaaaccgtttaaaattttcgataaacccaagtatgaaaagacttatgtagatgctaaaggtaaaacatatcattatagtgtaccgcctttattcgcttttattacaacgtttttaattggtatattgacaggtttatttggtattggaggtggcgcactgatgacgccactaatgcttattgtatttagatttccacctcatgtagctgttggaacaagtatgatgatgattttcttttcaagtgtcatgagttctatagggcacattgctcaaggtcacgtagcttggggttatgcaatcattttaattatatctagttattttggtgcgaaaatcggtgtcaaagtgaatcaatcaattaagtcagatacggtagtaacattattgagaacagtaatgttgttaatgggtatatatttaattattcgtgcgttgatttaatacaactttaaaaggaggacgtcaatttgaggcttacaatttatcatacgaacgatattcatagtcatttacatgaatatgaacgcattaaagcatatatggcagaacataggccacgacttaatcatccttctttatatgttgatctaggtgatcatgtagatttatccgcacctataacagaagcaactttaggtaaaaagaatgtagcattactaaatgaagcaaaatgtgatgttgcaacaatcggtaataatgaagggatgaccatttcacacgaagctttaaatcacctttacgacgaagcaaaatttatagtgacatgtagcaatgttatagatgaatcaggtcatttaccaaataatatcgtttcttcttatattaaggatatagacggtgtgaaaatactattcgttgcagcgacagcaccttttaccccattttatcgtgcactagattggattgttaccgatccacttgattctataaaagaagaaattgaacttcaacgaggtaaatttgatgtattaatcgtgctaagtcattgtggcattttcttcgatgaaacattatgccaagaattgcctgaaattgatgtcatttttggtagtcatacgcatcattattttgaacatggtgaaattaataatggtgtactgatggcggcagctggaaagtatggtaattatcttggagaggttaatttaacttttgaggcacataaagtagtacataaaactgcaaagattattcctttagaaacattacctgaagttaaaacttcatttgaagaagaaggaaaaacgctaatgtctaatccggtaattcaacatccagtagtgcttaagcgtagtatgaaccacataactgaagctgcatacttattagctcaaagtgtttgtgagtatacacatgcacaatgtgccatcatcaatgccggcttactcgttaaagatattgtaaaagatgaagtgacagaatatgacattcatcaaatgttaccgcatccgattaatatggtaagggttagactttctggtgtgaaattaaaagagattatagctaaaagtaataaacaagaatatatgtatgaacatgcacaaggtttgggtttcagagggaatatatttggaggatatattctttataatttaggatacattcattctacagggcgttactatctgaatggagaagaaatcgaagacgacaaagaatatgtattaggtacgatagatatgtatacgttcggtcgttatttcccaacattgaaagaattaccaaaagagtatttaatgccagagtttttaagagatatatttaaagaaaaattattggaatattaaaaagtaagattattggattttcatttgtcatgaatttcgatataatgtttaaagatacacttaacaggagggtatgtgttgttatggcgacaaaaaacgaggaaatattacgtaaaccggattggttgaaaataaaattaaataccaacgaaaactatacaggacttaagaagatgatgagggaaaaaaatcttaatactgtatgtgaagaagctaaatgtcctaatatacatgaatgttggggtgcacgtcgtacagcgacatttatgattttaggtgccgtatgtacaagagcttgtcgtttttgtgcggttaagacaggtttacctaatgaacttgatttaaatgagcctgaacgtgtagctgaatcagttgaattaatgaatttgaaacacgttgttatcactgctgttgcacgtgatgatttaagagatgctggttcaaatgtttatgctgagacagtacgtaaagttagagaaagaaatccatttacaacgattgaaattttaccatcagatatgggcggggactatgatgcgttagaaacattaatggcttcaagacctgacattttaaaccataatattgaaactgttcgtcgattaacaccgagagttcgtgcgcgtgcgacatacgacagaacattagagtttttacgtcgttcaaaagaattacaaccggatatcccaactaaatcaagtattatggttggattaggtgaaactatagaagaaatttatgaaacgatggatgatttacgtgcgaatgatgtagatattttaacgattggtcaatatttacaaccttcacgtaaacatttaaaggttcaaaaatattacacgcctttagagtttggtaaattaagaaaagtggcaatggataaagggtttaaacattgccaagctggacctttagtacgtagttcatatcatgcggatgagcaagtaaatgaagctgctaaagaaaagcaacgccaaggtgaggcacagttaaatagttaatatttaaccattaataaggcataaaggcttagtttgtacaaaacgaacgtgtcatagaagtaatcattatttttatgaaacactaaaagtataaactgagcctttcattgtcatagataggtgaagaatttgataaaagtagatcaacattactttgaattaatagaaaattatcgcgaatgttttaatgaagaacaatttattgctaggtattcagatattttagataaatatgattacatagttggtgactatggttacgatcaattacgattaaaaggcttttacaaagattctaataaaaaagcagagatgagtaaacgtttttcaaatattcaagattacatatttgaatattgtaactttggttgtccttactttgtattaagacatttgtctaaacaagaggttaaaaagttaatcgaagaagttcatccgtctgatgtgatagatgacgacaataaacttcaagatgtgaagattaagccgaccattcaagatactgaacattaataaaacccttagctagattgaaaatgggaatcatgcaattcaagcatggacctgtaatctagttaggggtttttatctttaatgaatgacttcatttaaatactcagtaatttcatcgccttcttcagcatttacacctaaaatatgagcgatatagccttcttcttttaaatcatcagtaccgataataccgaatttatttgtttgcatattaagtacgagtgtcttaccataatgtctatttgtatggactaacatcaaatcatatcgactatgctcgccaacaaaaccaacaaactgaacttgactctcttcgttgtcatcatataaatacatatcaatcattttgtagcgactccttttaaaagtagtaaagttagtataacgacaaatgaagtatactgcaaaattatgataatatataagcgagaggtgacaaggaatgtattttgtagacaaagataaactaactcagaaattagcctatttacaagcattaactgatgattatcatgagagcaagcacaatcattatgcatttgaacgcattgctcaaatgttgatagaatcatcggtagatatagggaatatgattatcgatgcatttattttaagggatcctggtaattataaagatgtgattgatatattagaactagaaaatgttattactaaagaaacacagcaggcaatcaataaaactgtcgatattcgtaaacaatttacatatgattacacagccttagatattaaggttatcatgccaatgtttgatgacgcattaccttattacaaacaatttattacagaagtaacgacatttttacatcaagaaaatgtaccagtaacagcttttggtaaaggagaaaatcaataatgaaacagtataaagcgtatttaatcgatttagatggcacaatgtatatgggaacagatgagattgatggagcaaaacaattcatcgattatttaaatgtaaaaggcattcctcatttatacgtaactaataattcaacgaaaacacctgagcaagtaactgaaaaattacgtgaaatgcacattgatgctaaaccagaagaggttgtaacgtcagcgttagccactgctgattatatttcagaacaatcaccaggagcatcagtatatatgttaggtgggagtggtttaaatactgcgttaaccgaagcgggacttgtcattaaaaatgacgagcatgttgattatgtagttattggacttgacgaacaagttacatatgaaaagcttgcgattgcaacgttaggtgtaagaaatggagcaacatttatttctacaaatccagatgtgtcaattccaaaagagcgaggatttttaccagggaatggtgctattacaagtgttgtaagtgtatcgacaggtgtatcgccacaatttattggtaaaccagaaccgattattatggttaaagcattagaaattttaggattagataaatccgaagttgctatggtaggcgatttgtacgataccgatattatgtctggtattaacgtaggtatggatacgattcatgtacaaacaggtgtatctacgttagaagatgtgcaaaataaaaatgtgccaccaacgtattcttttaaagatttaaatgaagcaatagctgaattagaaaaatagtatatattcattttataaagtaggtgaatagatttggtaaaaatagttgtttcgaggaaaattccagataaattttatcaacaattgagtaaacttggtgacgttgttatgtggcaaaaatcattagtgcctatgcctaaagatcaatttgtgacagcacttcgtgacgcagatgcttgttttataacattaagtgaacaaatcgatgcagaaattttagcacaatcaccaaatttaaaagtaattgcgaatatggctgtaggatatgacaacatcgatgttgaaagtgcaacagcgaacaacgtggttgtcacgaacacaccaaatgttcttactgaaacaactgcagaattaggatttacattaatgcttgctacagcacgtcgtattgtagaagctgaaaaatatgtagaagcagatgcatggcaaagctggggtccttatttattgtcaggtaaagatgtcttcaattcaactattggaatatatggtatgggagatattggtaaagcttttgcaagaaggttgcaagggtttaatactaaaattctttatcataatcgatcaagacataaagatgcagaggcggactttaatgcaacatatgtttcttttgaaacgttgttagcagaaagtgattttatcatctgtacagcgccacttacaaaagaaacacatcataaatttaatgctgaagcatttgagcaaatgaaaaatgatgcaatttttattaatatcggtagaggacaaattgtagatgaaacagcattaatcgatgcactagacaataaagaaatattagcatgtggtttagatgtattagcaaatgaaccaattgatcatacacatccattaatgggacgtgataatgtactgattacaccacacattggcagcgcatcagtaacaacacgggacaatatgattcaattatgtattaataatatagaagcggttatgacaaatcaggtaccacatactccagtaaattgaaagtaagtatggtttttaatcattggtaaaacaagcaaagcaattgttaaatatcttatgcttgacttgcgaatatatataattacgctgatgttaattccataacattataaactcgtcatattaatgtgatgagtttatttgattttgacgtatataacaaaattgttatatagactgtaattgtttattgtttaaataacctttaaaatgaatgatgttctcaacatagtgtatcatttacaataattgagtgatgacaaccaattactatgttgaatctataaaattaaaattgaatttcattatgaatatcgatataatgaattgtaaaaaacaaattttaaaacgtattttatattgaacggtctttataaaggcgtttttactaagaactttaagaggtgcaatatgaaatctaaaagtaaacagccacctaataaatatgttgaagcattcaaaccatatttattaacactattgtatttggcaatatttattactttatatttaatttatggcagtggcgacacacacaataacttcatttataatgagttctaatgagggagacttaatatgacagatattattaacaagctgcaagcgtttgcggatgcaaatccacaaagcattgctgttagacacacaactgatgaattaacttatcaacagttaatggatgagtctagtaaattagcacatcgattacaaggtagtaagaaaccgatgattttattcggtcacatgtcaccatatatgattgttgggatgattggtgccattaaagcaggatgtggatatgtacctgtagacacttcaattcctgaagaccgtattaaaatgattattaacaaggttcaaccagagtttgtatttaatacgactgatgaattgtttgaaagtttagcaggtgaagtatttacaatagaagatattaaaacatctcaagacccagtaatttttgatagtcagattaaagataacgacacagtatacacaatctttacatctggttctactggggaacctaaaggtgttcaaattgaatatgcaagtttagttcaatttactgagtggatgttagaacttaataaatcaggaaatgaacaacaatggcttaaccaagcgccattttcatttgatttatctgtaatggctatttatccatgtttagcgtcaggcggtacattaaatcttgtagataaaaacatgattaataaacctaaattattaaatgaaatgctaacagcaacaccgattaacatttgggtatcaacaccatcatttatggaaatgtgtttattattaccaacgcttaatgaagaacagtatggtagtcttaacgaattcttcttctgtggtgaaattctacctcacagagcagcaaaagcgttagtaagccgtttcccaagtgcgacgatttacaacacatatggtccaactgaagctacggtagcagttacaagtattcaaattacacaagaaatcttagatcaatatccgacattacctgttggcgttgaaagaccaggcgcaagattatctacgacagatgaaggtgaacttgttatcgaaggtcaaagtgtaagtttaggatacttaaaaaatgaccaaaaaactgctgaagtatttaatttcgatgacggtattcgtacttatcacactggtgataaagcgaagtttgaaaatggtcaatggttcattcaaggtcgtattgatttccaaatcaaattgaatggctacagaatggaattagaagaaattgaaacacaattacgccagtctgagttcgtaaaagaagcgattgttgtacctgtatataaaaatgataaagttattcatttaattggtgcaattgtgccaacgactgaagttacggacaatgcagaaatgactaaaaatattaaaaatgacttgaaatcacgcttaccagagtatatgattcctagaaagtttgaatggatggaacaattgccattgacttcaaatggtaaaattgacagaaagaaaattgcagaggtaattaacggatgattccatatggtgattttacattcttcttaattgctttaattgcattattaccagtcattatacttggatttttaggtaagcgaagttacatttataatggcgtagttacagcatttatgattgtgttaatcttttcttctgataaacataatctgtttgaccaaaagtatttaagtgttcaattaattagttttattatttacgtcgtatggcaagttttattgataatgttttattatcattcaaaaccaaaaaataattcattttcaaaatttgtaactgtaatggttttatcaatattgccattagcacttgtgaaagtgttacaaagtacatggttaggtggacatcagattcacttccatgaaagtaaattaattgaatttgttggtttcttaggaatttcttatgttacattcaaaagtgtgcagttaattatggaaattcgtgatggttctatcaaagaaattaaagtatggaaattaattcaatttatttcattcttcccaacgatttcatctggaccaatcgatcgttacaaacgtttcgttaaagacgataaaaaagtaccaacaggcaatgaatatcgtgaattagtattaaaagcaattcacatgattatgcttggtttcttgtataaatatattgttgcttactttattaacacatacgcaatcatgccgttacaattagacctacatggctttgtcaatttgtggttatatatgtacgcatacagcttatatttattctttgactttgcaggttatagtttatttgcgatagcatttagttatttattcggtattaaaacaccaccaaacttcgataaacctttcaaagcgaaaaatattaaagatttctggaatagatggcatatgacattatcattctggttcagagattgtatttatatgagatctttattctacatgtctcgtaaaaaattattgaagagtcaatttgcaatgtctaacgtggcattcttaatcaacttcttcataatgggaatttggcatggtatcgaagtgtattacattgtttatggtttataccatgcagcattgtttataggttatggctattatgaacgttggcgcaagaaacatccgccacgttggcaaaatggtttcacaacagcacttagcattgtgattacattccactttgtaacatttggctttttaatcttctcaggtaaacttatataataaaggagaatttaattatggaatttagagaacaagtattaaatttattagcagaagtagcagaaaatgatattgtaaaagaaaatccagacgtagaaatttttgaagaaggtattattgattctttccaaacagttggattattattagagattcaaaataaacttgatatcgaagtatctattatggactttgatagagatgagtgggcaacaccaaataaaatcgttgaagcattagaagagttacgatgaaattaaaaccttttttacccattttaattagtggagcggtattcattgtctttctattattaccagcacgttggtttacaggcttagtaactgaaaagactgtagaagataatagaacttcattgacagatcaagtactaaaaggcacactcattcaagataagttatacgaatcaaacaagtattatcctatatacggctctagtgaattaggtaaagatgacccatttaatcctgcaattgcattaaataagcataacgccaacaaaaaagcattcttattaggtgctggtggttctacagacttaattaacgcagttgaacttgcatcacagtatgataaattaaaaggtaagaaattaacatttattatttcaccacaatggtttacaaaccatggtttaacgaatcaaaactttgatgctcgtatgtctcaaactcaaattaatcaaatgttccagcagaaaaacatgtctactgaattaaaacgtcgttatgcacagcgtttattacagtttccacatgtacacaataaagaatacttgaaatcttatgctaaaaaccctaaagaaactaaagatagttatatttctggttttaaagagaatcaattgattaaaatagaagcgattaaatcattgtttgcaatggataaatctccattagaacatgttaaacctgctacaaaaccagacgcttcttgggatgagatgaaacaaaaagcagttgaaattggtaaagctgatactacatcgaataaatttggtattagagatcaatactggaaattaattcaagaaagtaagcgtaaagttagacgtgactatgaattcaatgttaattctccagaattccaagatttagaattacttgtaaaaacaatgcgtgctgctggtgcagatgttcaatatgtaagtattccatcaaacggtgtatggtatgaccacattggcatcgacaaagaacgtcgtcaagcagtgtataaaaaaatccattctactgttgtagataatggtggtaaaatttacgatatgactgataaagattatgaaaaatatgttatcagtgatgccgtacacatcggttggaaaggttgggtttatatggatgagcaaattgcgaaacatatgaaaggtgaaccacaacctgaagtagataaacctaaaaattaaaatacaaatagcacataactcaacgattttgattgagcgtatgtgctatttttatattttaaatttcatagaatagaatagtaatatgcgcttggatatgtggctataataaaataattaatcagataaatagtataaaataactttcccatcagtccaatttgacagcgaaaaaagacaggtaataactgattataaataattcagtattcctgtctttgttgttattcataatatgttctgttaacttaatatctttatattagaatacttgttctacttctattacaccaggcacttcttcgtgtaatgcacgctcaataccagctttaagagtgattgtagaacttgggcatgtaccacatgcaccatgtaattgtaatttaacaataccgtcttccacgtcaatcaatgagcagtcgccaccatcacgtaataaaaatgggcgaagacgttcaataacttctgctacttgatcaaacatcgttgtatcttcagtaggcatcaggcaagtctcctttcgagagatgaatttgataatctttattagtatattataatagatagtgtaataaaaatctatcaaactaatgggggataaatatatggagcacgtgagtgtggtagtatatggggcagatgttatatgtgcaagttgcgttaatgcgccaacatcgaaagatatttatgactggctacagccgctattaaaaagaaaatacccaaatatatcatttaaatatacgtatatagatattacaaaagataatgacaacttaacagatcatgatttacaatttatcgaaagaatagaacaagatgaactattttatccattaattacaatgaacgatgaatatgtagcagatggttatatacaaacaaagcaaatcactcgatttatagaccaaaagcttgtgaatcaataatatacacataataaaaagcaatgtcagtaatagtgtgaactgacattgctttttaatttttaaccattatgatatttatataaccaaagtacgccggattttaaaatagaagcgagtcgtcctgttacagtgcgatccatgatatatgcaaaaccttgtttatctcctaatgacccaacgataccttgtacctttagttccggcattttgtcaggtaatggttcatttagccattgctttttaagcacatcggcaatttgatcaccttgaacttcggctaactgagcacttggcgcatgtggtaaatcagcacaatcaccaactacatagacgttacgatatgttggtacttgatgatactggttaactatcacacgtccattactatttatatcaatcggcaagttacgaacaacttcaacaggttgaattcctgctgtccatacaactaaatcaatatctttaggttcatcacagttatatattttaccaggttcaactttattaatatttgaatttggaacaacggtaacattatttttggcgaaccatttcgcaacatacttacttaatttttctggaaaatttcttaaaattcgtggcccacggtcataaagatatatttccaagtctgatctactttctcttaattcgctggcaagttctatgccgcttaatccagcaccaacgataccaactttagcaccttctggtagttcactaatactatggaaagtatcccgagcctttgagagtgtttgaatactatgtgtatattcttcggctcctggaacgttatgatatttatcttcacatcctaaaccaataattagctcatcataatcaattttagaattaccgactgagacaatttgagcatctaaatctatgtcgttaatttcaccataaaccgtattcacttgtggatgattagggaatttcatgcgaacatctttatctgatttcgtgcccgcagctaaagcataaaattctggtttcaatccatgaaatggcatacgatcaactaatgtgactgtataatcttgtggtaaagatgtagttaaaatgcgtgacatgatacgcatattaccatatccgccgcctaacaaaactaagtttttcataatgaagtaccccttttatatgttaatatttactttaattttgaaaagatcaaagtgcatagatatatttgttaatgaacagttataaaatgcaagtgtctttgattcatcaataacccctaaaaaagtaaatatgtatttatatgcttattatatatttttttgaaaatgactacaaataaatatttgtcctaactaaggcactattacataactgggataagaaacatcagttgttgctaattgagcacatcatgttaaaataccagttttaaaatgctataatattgtaacaaatgaaataagaaggtgaagtatgaatccgatcgtagaattttgtctctctaacatggcaaaaggtggagattatgtttttaatcaactggaaaatgacccagatgtcgatgtgttagagtatggttgcctgacacattgtggtatatgttcagccgggttgtatgctttagtaaatggtgatattgttgaaggtgattcgccggaagaattattacaaaatatatatgcacatataaaagaaacttggattttttaaggaggagttatcatgccaacagttatattaacagaagcagctgcttacgaagtaaaagatatgcttaaagcaaatgaaatgccagatggctatttaaaaattaaagtgaatggtggcgggtgcactggtttaacatacggtatgggtgcagaagaagcgcctggtgaaaatgatgaagtcttagaatattttggattaaaagttttagtagacaaaaaagatgcacccgtattaaatggtacgactattgattttaagcaatcattaatgggtggcggtttccaaatcgacaatcctaatgcaattgcttcatgtggctgtggtagttcatttagaactgcaaaagttgcaggtaatcctgaaaactgctaataaaataactttttaatgattaacccaatttttgggatacaaattgatatcaattacgattagggacatatttgattatgtcctatttttgcgtaaagatattttgttttattaaaaagcttattaaaaattaagaatctgactattaatagtattttaaatgattgtgatagcggatacatttttaatcgaaatcaggctacgaaaaaattaattaattttttcacaatctgactgaatcttgcttgaaaatataacataaaagctatagaattagtattggattaaaaatgtcttttttgtgaacatcacaggtttttacataatttaaaagacttaaataacaaaatgatgataaactagtatacattgtggtaaaagtagtaatgaccagttgttactagtaattatcagcatttggttaaaaaaatatgaaagcttaggtgaaattaaatggctcaagatcgtaaaaaagtacttgtacttggtgctggttatgcaggtttacaaactgtaactaaattgcaaaaagcgatatcaacagaagaagcagaaattacgcttattaataaaaatgaatatcactatgaagcaacatggttacatgaagcatcagcaggtacactaaactatgaagatgtattatatcctgtggaaagtgtcttgaagaaagacaaagtgaactttgttcaagcagaagtaacaaaaattgaccgtgatgctaaaaagatagaaacaaatcaaggtatttatgactttgatattttagtagtagcattaggtttcgttagtgaaacattcggcatcgaaggtatgaaagatcatgctttccaaattgaaaatgttatcacagcacgtgaattatcacgtcatatcgaagacaaatttgctaactatgcagcatcaaaagaaaaagatgataacgatttatctatcttagttggtggtgctggattcactggtgttgaattcttaggtgaattaacagacagaattcctgaattatgtagcaaatatggtgtggatcaaaataaagttaaaatcacttgtgttgaagcagcacctaaaatgttaccaatgttctcagaagaattagttaaccacgcagttagctacttagaagaccgcggtgttgaatttaaaattgctacaccaatcgttgcttgtaacgaaaaaggtttcgtagttgaagtagatggtgaaaaacaacaattaaatgcaggtacttcagtatgggcagctggtgtacgtggtagtaaattaatggaagaatcatttgaaggcgttaaacgtggacgtatcgttacaaagcaagatttaacaatcaatggttacgacaacatttttgttattggtgactgttcagcgtttatcccagctggagaagaacgtccattaccaactacagcacaaattgcaatgcaacaaggtgaaagtgttgctaaaaacattaaacgcatcttaaacggtgaatcaactgaagaattcgaatacgttgatcgtggaactgtttgttctttaggttcacatgacggtgtaggtatggtatttggtaaacctatcgctggtaaaaaagcagcattcatgaaaaaagtgattgatacacgtgcggtattcaaaatcggtggtatcggtttagcattcaaaaaaggtaaattctaggctttaaattaagatatagctaaacacataaaattaaattattcatttataaagtccttcagtgtcactgaagggctttattgttgtacaatttgaagtgagtaacatatcaaatctaaggaggtacattatgaattttaaattaaataacacactaagcaacgaaataaatacgttgattattggtataccagaacatttaaatcagttagaacgcattagttttaatcatatcgatattacagaatcacttgaaagactaaaacatcaacatattattggtagtaaagttgggaagatttatacaactgcatttgatgtacaagatcaaacatatcgtttaattacagttggtttaggaaacttaaaaacacgtagttatcaagatatgttgaaaatatggggacatcttttccaatacataaagtcagaacacattgaagatacgtatttacttatggattcatttatttcaaaatatgatcagttatcagatgtattaatggcatgcggtattcaaagtgagcgtgcaacatatgaattcgatcattataaatcaagtaagaaggcactgtttaagacgaatttaaaccttattagtgaatcattaattgaattagatttcattcatgagggtatcagtattggccaatccattaatttggcaagagactttagtaatatgccaccgaatgtattaacaccacaaacatttgcagaagatattgttaatcattttaaaaatacaaaggtcaaagtagaggttaaagattatgacactttagtttctgaaggatttggacttttacaagcggtaggtaaaggtagtaagcataaaccgagattagtaaccatcacatataatggcaaagacaaagatgaagcaccaattgccttagttggtaaaggtataacgtatgattctggtggttatagtattaaaacgaagaatggcatggctacaatgaagtttgacatgtgtggcgctgcgaatgtcgttggtatcattgaagcggctagtcgtttacaactgcctgtaaatattgtcggagtgcttgcttgtgctgaaaatatgataaatgaagcatcaatgaagccagatgatgtatttacagcgttaagtggtgaaactgtagaagtaatgaatacagacgctgaaggtagattagtccttgcagatgctgtgtattatgcaaatcaatatcaaccgagtgtgattatggactttgctacgttaacgggtgcagccatcgttgcacttggcgatgataaagctgctgcatttgaatcaaatagtaaagtgatattaaacgacatattacaaataagttctaaagtcgatgaaatggtatttgaattaccgattactgcaaccgaacgtgcaagtattaaacacagtgatatcgctgatttagttaaccatacgaatggacaaggtaaagcgctatttgcggcaagttttgtaacacattttagtggtcaaacacctcacattcatttcgatattgcaggtccagcaacgactaataaagcttcatataatggtccaaaagggccaacaggatttatgattccgacgatagtacaatggttaaaacaacaataatttaattaattgcctgatacaacttgtgtcttgttatacatttctaatttaactcttgaaagtataaaggatcgcattgtatcaggcattttcattattgtaagaaaatataaatcgcatatccttgtgagcataaatcagcttgactagcattgcaaaaacttattataagcatatgttcattcagtcaacgactactaatataacattatagaacttaggattttgattggtgttccaggcttgtaaaattgtttaatttaatgaaagcgaaaattattttaagaaagacaattaactaaaaaataaagattattggtatagtttgctattgacaggtgttaaagctactgatactatgtagtctataaacgctttagttcgatagagtgataaaggatggttgtcatatgataaatgcagtagtaatagcagtaatattaatgattgtgctatgtttatgtcgattaaacgtagttataagcttatttatcagtgcgctagttggtggtttaatttcaggcatgagcattgaaaaagttataaatgtatttgggaaaaatatagtcgatggtgctgaggtagcattaagctatgccttattaggtggatttgcagcattaatttcatacagtggtatcacagactatttagtaggaaaaattataaatgcaattcacgctgaaaatagtcgatggtcaagagttaaagtgaaagtgacaataattattgcattattagctatgagtatcatgagtcaaaacttaattcctgtacatattgcattcattccaattgtcatcccaccattattaagtctgtttaatgacttaaaaatagatagacgtttaatcggtttgattatcggttttggtttatgtttcccgtatgtgttattaccatatggattcggtcaaattttccagcaaattattcaaagtggctttgcaaaggcgaatcacccaattgagtttaatatgatttggaaagcaatgcttattccttcaatggggtatattgttggcttacttatcggtttatatgtatatcgtaaaccacgtgaatatgaaacacgtaaaatttcagatagtgacaatgttacagagttaaaaccatatatcttaatagtaacaattgtagcaatactagctacatttttagtacaaacgtatacagattcaatgatttttggtgcactggccggggtactcgtattctttatttcacgtgcatataattggtatgaattagatgctaagtttgttgaaggtattaaaattatggcttatattggtgtagttattttaacagcaaatggatttgctggtgtaatgaatgctactggtgatatagatgaattagttaaaactttaacaagtattactggtgataataaattatttagcattatcatgatgtatgtgataggtttaattgtcactttaggtattggatcatcatttgcaacaattcctattatcgcatcattattcattccttttggagcgtcaattggactagatacaatggcattaatcgcattgattggaacagcgagtgcattaggtgactcaggttcacctgcaagtgattcaacattaggaccaactgcgggattaaatgttgatggccaacatgatcatatacgcgatacatgtgtaccaaacttcttgttttataatattcctttaatgattttcggtactattgctgctatggtactataagcataaagaggtgaaaatatgactcatttattagagacatttgagatgtcaatagatcaccaggaagatggtttagttgttatttctatgcctgttactgataaagtaaaacaaccatttggatatttacatggcggtgcttcgattgctttaggtgaaacagcatgttcattaggatctgctaatctaattgatacaaccaaatttattccattaggtttagagatgaatgccaatcatattcattctgctaaagatggtcgtgttactgcgacagctgaaattattcatcaaggtaagtcgacacatgtatgggatataaaaattaagaatgacaaagaacaattaattacagttatgcgtggtacagttgctattaaacctttaaaataaaagaactgctagctgaaatgttatgagatattcataactacggctagcagtttttttatgcgctatattgttgtaattttagaaatgcttgttcaatgcgttcggcagctttacggccacccataacatttctaccaaatggtcctaattctaagtctgcaaagcatcctgcgacatatagatttggtatccattctaatttttcggaaataacagggtaattacattcgttgataggtgcatcataattttgtattaattgcttaataagtggttgtgacataaaatcttgttcaaaaccagttgccaccataatctgttgatatggaacagaatcattttcagtgttaattacaccaccactaatttgagtgataggtgttttatgcacatttatacgaccatttttaatatgttttttaaggcgtaagtacagttcgtgaggcattgatcctttatgacgttcacgttgtacaatggcatttctttcaggcatgcttttagtacttaaaaatgaagacatatttttcggacctaaccaaccaggatcagcatcaaagtcatgtatttcaatatctttatttagccataaatgaatctttttatcgtcatcatgatttaacaatttaagtgcaagatgtgctgcagtaatgccactaccaacgatatgatcggtcttatcatatactacttgatcatgttctttctcgaagatatgatttacattctgtttgtcttttaaaatgtcaggcataaacggaatatttgtactgcctattgcaataacgacgcaatctgtagtgataatttgtccatcttctaacttgatataccatttgtcttcttgtttatctaaagtttgaactaaaccttgaaccaagcaatcctctaattgatattgtttagaagcatgtgcaatatgatccataaacattgtcaattcaggtcgttgataaggaccataaaaagcatttgtatattggtgctgtttagcgaattgttttagatggaacggttgtggatgtacgtgatgtacaatcggtgatcttaaataaggcatttctattcgatttgtatatgagttaaacctttgacaaaaagtttcgtgtgggtcaatgattgttaatcggtctgttgttaatccgcttgataatagtttttgtgcgattgcagttccctgtatgccaccgccgataattgtccaatgcataataaaacctctctctttaaagcgtaatcgttacgatttataattattattatcataatacataacgacatgaaaggcaattaaattaaagagatatacatagatagggcgaagttgtagtcaaagaagtatatactaaactaaaatcattgaaaaagaggtaacaatgtcaaaagaaaacagcagtaaaatcattcctaatttggaatcatcttactgctgtttgttgttgatttatattcatgactttgttatataagttataattttgtgtcttttaagtcttccgaaatttcatcgactttagtctttttagtataaggcgttttaatattatatgctgctttcataatcatatgacttgaaagaggacctgtaattaatacaaagataatcgcaacgattaattgcatatttacaaaaccttgcgtagcaataaaatataaaaacgtaccaaatagtaatgacattgcacctaatgttgatgcttttccggcagcatgtgcacgtgaatatacatcttcaagtctcaataatcctatggctgctagggcgctaattaaagcaccgatgataacaaagataagtgcaagactaatcagtatgattttgatcatgttcaatcaccttacctttgtccataaatttagagaatactgcagtacctaaaaaggctaatataccaatcatcataataacgacaatcatgtatttgatatttaataaaatactgaataatgctataactgccattaattgaagaccaatcgcatctaatgcgacaacacgatcggcaagtgatgggcctagcacaacgcgaatgagcatagctaacatagaaatgacaactatgattaatgcaataacgataataacattatgattcattatatttcgcccacctctcttacaattttctctaatgatgttttaatactttctacttcttgctctttagttgaaaaatctatggcatgaatataaatttttgtacgatcatcacttacaccaagcactacagtaccaggtgttaatgtaattaaattagacaacaagacaatttgccaatctttttttaaatctgtgtgataaacaaagaatcctggttcatttttaatcgaaggtttaataataattttcagaacatcaaaattagctttaatcagttcgattaagaaaataataactaatttaataatacgatatagcgtgatgacataaaatctacctggtaacactctgtgtaagaggtaaacaagaactaggccaaagatgaaacctaacacaaagttatttgttgtgtaactatttgtcacaaacaaccaaaacactgcgataataaagtttaatactaattgtacagccatgttatttacctcctaatacagctttaacgtaggttgatggattgtagaatgtttctgcaccagcttttaccattggatataagtaatctgctgacaatccatataaaacagttatcacaactgcaacgattgcaatcgtagttaaatatttgacgtcgactttgttattaagatcatatccttttggttgaccgaaaaagccttgtaggaatatgcgaatgacagaatataatacgactaaacttgataataagacgatgacaccacttaaataaaatcctctttcaaatgttgattggacaatgaaaaattttccataaaagccactgagtgggggaatgccagctaaacttaatgctgcgataaagaatgaccaaccaagtacaggatatcgtttaattaagccaccaaattgtcttaaatcagcgatgcctgtaattttaatcataattccgataagcaagaataatgcaagttttactaacatgtcgtgcaatgtatagtaaatagcaccaatcatacctgactctgtcatcattgcaacgccgactaagatcacacctacagcaatcatgacattgtataggatgatttttttaatgttggcatatgcaacagcaccgacacaaccaaagatgatcgttaatagtgctaagaataaaatgacataatgtgaaaagcttacattatcactaaagaataggctcaatgttctagcgattgcataaacaccaacttttgttaacaaagcaccaaagaatgctatgattggaattggtggtgcatagtatgcactaggtaaccaaacaaacattgggaatacgccagcttttgtagcaaaaacaaagataaatagtatgaaaacgatattgactaagccactgtcatgcgctgaaaggttagctaatttattgcttatatctgctagattcaatgttcctactactgaatacaaaatcgctacacccattacgaagaaggatgacgatacaacgttaacaagaacatattttattgtttcttgtaattggatttttgtagaacctataactaataagaaataagatgacattaaaaatacttcgaaaaatacgaataggttgaaaatgtcaccagttgtgaatgcaccaatgatacctattaacataaatagtactgaaaaataataataatatctttcacgttcaatacctattgtttggtatgaatataaaatcacaatagctgtaataataatactagtaataattagtagggcactgaatatgtctaatacaaagacaatactgtatggtgctttccatgaacctaactctacgcgtattggtccatgttttacaacatttgctaaattgataattgccgcgaccaaggttaataatgtaccgcctagtgcgacataacgctttataataggacgctttccaataaagacaagtaatatggctgtaattactggaataactagcgttaacacaagcatattactttcaatcatcttctggaactcctttcatactctcaacgttatctgtgcctaattctttatatgttctaaatgctaatactaagaaaaaggctgttgtcgcaaaagcgataacgattgctgttaaaataagtgcttgcgggataggatcaacatagctttttacgttcgcttcataaattggaaccgtaccatgtttaagtccgcccatagttattaaaaataaatttgctgcatgtgttaatagtgtagttcccataacaattcgtatcagacttttagacaaaacgagatagacactaattgctgtgagaataccactaacaaaaatcataataatttccactattcgttctctccaatcgaaataataattgtcatgacagtaccaactactgcacataaaacaccgaaatcaaagaatactgctgttgtcatatgaacaggttctaatataaataacggtatatcaaatgtgacatgcgtaaagaaatttttgcctaaaaaccaacttgcgataggcgtcgcaatacaaaaaactaatccgatacctatcaagattttaaaatctaatgggaaaattttacgcattgtttctatatcaaatgcaatcgtaatgataacaagtgaacttgcgaataataatccgccgacgaaaccgccaccaggtgtataatgtcctgctaagaaaagtgaaaaaccaaagaccattaccatgaaaaagataataactgcagcaaattgcaaaattagatcattttgttgtctattcatgatttttcacctcgttaccttgcgtttgacgctttttacgtaatttaatcattgtatatacagctaatcctgcgataccaagcacagatgactcgaataaagtatccataccacggaaatcaacaagtataacgtttaccatgtttttaccgtgagctaaatcataaacgtgctcttgataaaacttagatatcgattcaaaatgtctatttccgtatgcaattaaaccgataataatgacggacaaaccaacaccaccagcaattaaagcattagtaagctggaatgagcgcttttcattataacgatttaaatttggtaagtggtagaagcataataagaacaatgctgttgaaatagattcaacgacaaactgtgtcaatgctaagtcgggtgctttaaagaatataaacaatacagacacagcatatccaactgcacttaacataataatgctaaataatcttgatttagcgaaaagaattaaaaaggcagcacttaataataaaattacgatacaaacttcgaaaattctaatcggactaacgtctttaaaattaatgttgaaaggtactgagaatacagtgacaaatgttaataaaattaatgcaccaaaaatgataactaaattattacgtgaataatcggtaacatagctattcgtcatcttttcagagtagtttggaataacatttgcacttctgttgtaccaataattgaatgttagtttaccaggttgtcgttgcaacaatttcacccaataactaaatgtcacaattagtaagatacctaaaatataaatcactaatgttgataaaaaggcaggcgttaatccatggaacatatggaattcaacatcatcaattaccgtatgattaatcgaagatgtagctggttcaataatcgaattagttaaaatgccagggaataaaccaaatacaattactaatgtagctaaaatagctggtgataaaagcattaatattgatacttcgtgtgcttttttaggtaattgttcaggtttatattgtccgaaaaatatatgcattataaatttaattgaatatacaaatgtgaagacactgcccactataccaatgattgggaataggtagcctaatgtatcaacactgaataaatttgcttggcttgctgtaaatgttgtttctaaaaatgattcttttgataagaaaccattgaacggtggtacaccagccatacttaatgctgtaataacagtgattgtaaatgaaataggcataactgttagtaagccacctaatttcttaacatcacgtgtaccagtagaatgatccactgcacctgtaatcataaatagggcacctttaaatgttgcatggttgattaaatggaatattgcagccgtaaatgcagcagcatatattttgctatcatcgccttgatagtgataactaatggcaccgattccaagcatcgccataatcatacctaattgggatactgttgaaaatgccagtatacctttcaagtcttgttgttttgttgcgtttagcgaagcccagaataacgtaattaaaccaacgagtgtgacagtccatatccaaccttgagatgctgcgaagattggtgtcattcgagcgattaaatataaccctgctttaaccattgttgctgaatgaagataagcactgactggtgtaggtgcttccattgcatctggtagccaaatataaaatggaaactgagcagattttgtaaaagcaccaatcatgattaaaatcatcgcaaaaatgaagaatgggctattttgaatttcagaagcatgttgaatcatgtactgaatgctaaatgattgcgttggtatagcgagtaagatgataccacctaataatgatagaccaccaaatactgtgattatgagcgatttttgagcaccatatatagatgcttgtcgttcgcgccagaatgaaataagtaaaaaactagaaaatgacgttagctcccagaataaatatagaataataacattatctgaaagtacgacacctaacattgcacccataaatagtaataaataacaataaaaattccctagttgttctgacttacttaagtagccgattgaatataatactactaaactgccgattcctgaaataagcaaactaaagagtaaacctaagccatcaagatataaatcaaagttcataccaaaatgaggcatccaatttaaggttttcattacagtattacctgacatcgtcgttttaattaatgtaagcatataaataaatatgacgatagggacaggtaatacgaaccatcctaaatgtatacgtttaaaaaatctatacaggataggaataatgagtgcgaatattaacggtaatatcaccgcaatatgtaacaaactcactatgttgtcctcctttaaaaaatatttatgttattcattatacatgaatgatatagttctgaaaaacgtacacactccttgttgtgctttattttcagaagtatttaaataagaagaaacacgtcattttttatttaaaattttctttgtattgaagtgaataatcttcttttaagcgtgctaaactagctaaagacatttcagcatgttttgtttgatgagctttaagtttagtttctaaatctgtaattgcttgttgaagtgaatcttcatagcgcaatacatcaacattgaagtcgcgtaattgtgaacgtttcgtatagcgtttttcaaaatgacttaatgctttgcgttcatggaaaaatacaccttcagtttcagtagggttatgtaaatcaccttgtttcgggtgtttgataacttgttcaactttaacaagtacatcgtctccattttcttcaacaatcgtgacaccatagctacctgttttgtgtgaaaatcgatatagcttcatgctattttcctcccttaaaagtatgttaatatatatgtatcataacatgaatggagaatataaatggctaactatccacagttaaacaaagaagtacaacaaggtgaaattaaagtggtcatgcacacaaataaaggtgacatgacattcaaattatttccaaatattgcaccaaaaacagttgaaaattttgtgacacatgcaaaaaatggttattatgatggaataacattccaccgtgtcattaatgacttcatgattcaaggtggcgatccaacagctactggtatgggtggcgaaagtatttatggcggtgcttttgaagatgaattttcattaaatgcatttaacttatatggcgcattatcaatggctaactcaggacctaatacaaatggttcacaatttttcattgttcaaatgaaagaggtacctcaaaatatgttaagtcaacttgcagatggtggttggcctcaaccaatcgttgatgcatatggcgagaagggtggtacaccatggttagatcaaaaacatacagtattcggtcaaatcattgatggtgaaactactttagaagatattgcaaatacaaaagtgggaccacaagacaaaccacttcatgatgttgtaattgaatctattgatgttgaagaataatatctaaacataattaactactagcattttaaactcggataaagctaatttgtgaatggattagtatatattccaacgaaaacaaataaactaacatgatgagcaatctcaatatatttatcaagaaagcacagtttttaaatagatgtgtattctaaagataatagttgaggttgctttttatgtttttacagagaattgctattcaaatagttaataaattgaaaacaaagtagctgtatatcatattgatttagataggaatttgttgctgattttatttgtaaatccaagtttgtagtattcttattcatttataaaataatattcgtatgatttgatgttttaattagtccaccatttcgatttgtgctatgataatagtgttaagtaaacgaaataaggggttattaagttgaataactacaaaattggccaacatatcaaggtgcgtgtaactggtattcaaccttacggtgcgtttgttgagacccctaatcatactgaaggactgattcatatatcagaaattatggatgactacgttcataatttgaagaaatttctatcagaaggccaaattgttaaagctaaaattttgtctatagatgatgaaggaaagctcaatctatcattaaaggataatgattacttcaaaaattatgagcgtaagaaggaaaaacaatcagtattagatgaaatcagagaaacagaaaaatatgggtttcaaacacttaaagaacgcttaccaatctggataaaacagtcaaagcgagcaattcgaaacgactaaaggaacagataaatcgtaccgaaaatcatacaaagggtctgaaatgaaagtttcttagactataaaagagattagtatctattaaattttattagatactaatctctttttgtatacgataacgtaatatgattgattctatttacacgtacaaatggtttaaggtgacatatgcattatctttgttagatagaatcgttgatttgcaatgatgtatgtggatttgtttttttaatttattttagaaatgagaactacaacttaaagtataaacgaattgcaactatataaacagataattggagaatgaaaaaattacatgttatagtcaactcaataattttaaggaggaattaagtaatgaaaagtaaatacgaaccattgtttgataaagtagtattaccaaatggagtagagttgagaaatcgatttgtgttagcccctttaacacatatttcttcaaatgatgatggtactatttcagatatagaacttccttatattgaaaagcgctcacaagatgttggtattacaattaatgctgcgagtaatgtgagtgatgtcggaaaagcatttccaggacagccatcaatcgcgcatgacagtgatattgaaggactaaaacgattagctacagcaatgaagaaaaacggtgccaaagcactcgtacaaatacatcatggcggtgcacaagcattgcctgaattaacacctgatggagacgtcgtagcaccaagtccgatttctttaaaaagtttcggtcagaaacaagaacatagtgctagagaaatgacgaatgaagagattgaacaagctatcaaggattttggtgaagcaacgcgacgtgcaattgaagcagggtttgatggtgttgaaatacatggcgcgaatcattacttaattcatcaatttgtatcaccatactataataaaagaaatgatgtatgggcaaatcaatataaattcccggtcgctgtgattgaagaagtgcttaaagcgaaagaagcgtatggcaataaagactttatagttggatacagattatctccagaggaagcggagtctccaggaatcacaatggaaattacagaggaactcgttaataaaattagccatatgccaatcgactatattcatgtttcaatgatggatacgcatgcaacgacacgtgaaggtaaatacgctggacaagaaagactgcctttaattcacaaatggataaatggtcgtatgccacttatcggtattggttcaattttcacagctgacgaagctttagatgcagttgaaaatgttggtgttgacttagtagccattggtagagagctactactggattatcaatttgttgaaaaaattaaagatggacgggaagatgaaattattaattactttgatccagagagagaagataatcatcacttaactcctaatttatggcatcaatttaatgaaggattctatccattgccacgtaaagataaataagtgtttaactgttaccactaatgatattgtgtatgcaatttgttagtggttttcaatatttataaataaaaatattcttagtaaaatatacttttgattaagtgtaaaattatcaattcttttgcttgtaatcatttaagtaattatgtcattataaatgtaagggttttcaaaatagacaaatttaatgaaacttagtgattaattcatcttttcgggtgaaaaagtatctgctttgaaaactaatgtaattatttggataatgtttcatgtataatagttataaatgatgaaaaggggagatatgatgactaaatctgaaaaaattattgagttaacaaatcattacggagcacataattatttaccattgccaattgtcatttcagaagctgaaggggtatgggttaaagatcctgaaggcaataaatatatggatatgttatctgcatattccgctgttaaccaaggtcatagacatccgaaaattattcaagcattaaaagatcaagctgataaagtgactctagtttcacgtgcttttcatagtgataacttaggagaatggtacgaaaaaatttgtaaactggcaggtaaagataaagccttaccaatgaatacaggtgctgaagcagtagaaacagctttgaaagcagcacgacgctgggcatacgatgttaaaggaattgagccaaataaagcagaaatcattgcatttaatggtaacttccatggtcgaacaatggcgccagtttcattatcatcagaagcagaataccaacgtggttatggtccgttattagatggatttagaaaagttaattttggagatgtagatgcattgaaagctgcaattaatgaaaatactgcagcagttttagtagaaccaattcaaggtgaagcgggtataaatataccgccagaaggatatttgaaagcaattagagaattatgtgatgaacataatgtcttatttattgctgacgaaatccaagcaggattaggtcgttcgggtaaattatttgctacggattgggataatgtaaaacctgatgtctatattttaggtaaagcactaggtggtggtgtcttcccaatttctgttgtattagcagataaagaagtattagatgtctttacacctggctcacatggttcaacatttggtggtaatccacttgcttgtgctgcatcaattgctgcattagatgttatcgttgatgaagatttaccaggacgctctttagaattaggagagtattttaaagaacaattaaaacaaattgatcatccatcaattaaagaagtccgtggacgtggtttgtttataggtgtggaacttaatgaaagtgctaggccatactgtgaagcattaaaagaagaaggcttattatgtaaagaaacgcatgatactgtcattcgttttgcaccaccattaattattactaaggaagaattggaccttgcacttgaaaaaataagacatgtatttcaataatgtcaaaaagttgtaacaatcagtttgtaagggctttaaaaaggaatacgttatgttacaatatgtttgaaagcgaaatcattaggtaaagaagaggcgaaaaggatcatgactgagaacaataatttagtaacttctactcaaggaattattaaagaagcattgcataaattgggatttgacgaaggaatgtacgatttaattaaagaacctttaagaatgttacaagtgcgtatccctgtacgaatggatgatggcactgttaaaacattcacaggttaccgtgcgcaacataatgatgctgttggaccaacaaaagggggcgtgcgtttccacccagatgttgatgaagaagaagtaaaagcattatcaatgtggatgactttgaaatgtggcattgttaacttaccatacggtggtggtaagggtggtatcgtttgtgatccacgtcaaatgagcattcatgaagttgaacgtttatcacgcggatatgtaagagcaatttcacaattcgtaggtccgaacaaagatattccagcaccagatgtatttacaaactcacaaattatggcttggatgatggatgaatatagtgcattagataaatttaattcaccaggtttcatcacaggtaaaccaattgtattgggtggttctcatggacgcgacagatcaactgcactaggtgtagttattgcaattgaacaagctgcaaaacgtcgtaatatgcaaattgaaggtgccaaggttgttattcaaggtttcggtaatgccggaagtttcttagctaaattcttatatgatttaggtgcaaaaattgtaggtatctctgatgcttacggtgcattacacgatccaaatggcttagatatagattatttattagaccgtcgtgatagttttggtacggtaacaaatttatttgaagaaacaatctcaaataaagaattgtttgaattagattgtgacattttagtaccagcggctatttcaaaccaaattacagaagacaatgcacatgatattaaagctagtatcgttgttgaagctgctaatggacctacaacaccagaagcaacacgtattttaactgaacgtggtatattattagttccagacgtattagcaagtgctggtggtgtaacggtttcttacttcgaatgggtacaaaataatcaaggttattattggtctgaagaagaagttaatgaaaagctacgtgaaaaattagaagcggcatttgatacgatttacgaattgtctcaaaatcgaaaaatagatatgagacttgcagcatatatcataggtattaaacgtacagcagaagcagctagatatcgtggttgggcataattaattatcgtatgtgatttaacgagcttgggacagaaaacaaagtcctaagctcgttaattttattttagcagtagttgatggtaaaacaatgcccgtgtaacacgctcttttcaatgcaagttggcggggccccaacacagaagctggtggaaagccagcttacaataatgtgcaagttggggcggggccctgaacacagagaatttctaattaaaccaggctgggacataaatcaatgttctatgctctacgaagttatattggcagtagttgactgaacaaaaatgcgtttgtaacaagctttttcaattatagtcaggggccccaacacagagaatttcgaaaagaaattctacaggcaatgcaagttggggtgtgggccccaacacagaagctgacgaaaagtcagcttacaataatgtgcaagttggggtgggacgacgaaataaattttgcgaaaatatcatttctgtcccactcccaaaaagacagcagtaggataatttcaattcggaaatatcttactgctgttttttatagtaatagctatatttttgtatttatgttttctagtttaacaatactatttaatgacttctttatatttatcagcaaaatttgtaaagacaccatcaacgccgtatttatttaatcgtaacatatcagctttttcatttactgtataaggatgtactataaatcctaagtcttttaaatgatgggtattttgttcagttaaatctgtataatcaggacctaatccaatcgcataagagcgtatctcttttaagcgttggtcgttaaattgttgtagttcacctttatcaactaattttactaatggcacatgcttattttgacgatgaattttctttaaactttcgtcagaaaatgattgaatcattacatgtccattttttaatttattgttatttaaaaggtgatgctttttcaatgaagctaataattgttcttccattcctgggtatacatcaggtgactttgtttcaatataatagtttgcattcggaccataacgttctaaaatttcatctaaagtgggtactttagcatttttataacttgctcttgcgtattttggatattttttattaaaccaacttcctgcatctaactgttttaattcatcaagggtataatcctcaactttaccgtgtccatttgttgtacggttaacagtttcatcatgcatagcaactaaatggccatctttggtacgttgtaaatcaatttcgatataagatgcttttaactcattatgactcttatcatatgcttgaaacgtatgctcgggtgcatagccacttgcgccacgatgtgcgatagtagtgaatcgctcattcgttaaatttgtatgccattgaatagcctgaggtttatttgcaatttgatttgtttgttcagcgccagcagtaggtactgataaaaatcccatagtaaaaacagcagaagcagccataaatttagtgaagcttttcgaagagttagtcatagtctttatcctttcatctctttatttgtagtctaacaattttaaaatactacaaaaacctgcttgtgaaaacgctttacacatttcttttacaatttataacatttctgtaatataaatttaaaagaattatcaaacattttaggaatcttaaaaatgtgatgttcaataagacgaaaagagcattaaaatacccacaatgtaattttcatagacattgtgggtaggtagattaatgtatttattgtgatagtaattgtttagcaacatcaagttgttgtttgaccgatgattgacccgtagaaccgtaactttgacgtcgttttaagcaattttcaggctgcaaataatcgtaaatatcggcatcgatactagaatgatgttgttgatatgttgataaaggaacatctaataaataatgaccttgttgtatacattctaagacgatttttcctacaatttcatgtgcagttctaaatggaatatttttagttactaaataatctgctagttccgttgcatttgaaaaatcttctttaacagtttgattgagtcgttctttattaattgtcatcgtttgaatcataccttcaaagatacgtaaagaacctttaattgtatgaactgcatcgaataaaccttctttatcttcctgcatatctttgttatatgcaagaggtaatccttttaaagtcataagcatgctcattaaatgaccagtcgttcggccaactttacctctaattaattctgccatatcaggatttttcttttgtggcataatagatgagccagttgaaaatgcatctgataatgtaatgaatttagcttcgtctgtggaccagaaaataatttcctctgcaaagcgtgataagtgaaccatcgttaaagaaatattatgcaatgtttcaataatatagtctctgtcactaacagcatctaggctattctcatagagactgccaaagttcaacaatgctgttgtctcgtgtctatcgatagggtatgtggtaccacttaaggctgctgcacctaaaggattaatatcgattcgttttaaactatcttcaaatcgttgttggtctcgttgtaacatccaaaaataagtcataatatgatgtgcaaatgaaattggctgtgcacgctgtaaatgagtataaccaggcataattgtatcaacattattggaagcgatgtctacaattacactttgtaacgacttaattaatgcgatgatatcttgcacttgtttcttagtgtacaagtgcatgtctgttgcaacttgatcgtttctactgcgtccagtatgcaacttaccaccagcgtcaccaatacgtttaattaattcatgttcaatatttaaatgaatatcttctaatgatgcactaaattgaatttgatcttgatgataatcatgttgaatagattttagtccttgtataatttgttcgctgtcttgttgactaataatgccttgatccgcaagcatagttgcatgcgcaatgctgccttcaatatcttgatctatgagcgtttgatcaaaagtaatggatgcgttaaagtcatcaacccactcttcaagttgtacttcaaatctaccgccccaagctttattgctcattgctatagcctccatgtaacatcgcatttacttgagtaggtaaaccatagatatcgataaagccaacagcagcgtcttgattaaatgcatcttcttttgtataagttgctaatttttcatcatataatgtgtaaggtgattttctaccattcacgatagcattacctttgaataatttaattctgacatcaccacttacgtattgctgagtactatcaataaataatttcaagctatcagttaaaggtgagaaccaaagtccattgtatagttgttcagcaaattgcttctcaatgattggtttaaagtgtgcaacatctttcgttaacgtaatcgtttctaatgctttatgtgcttttaaaataacttctgcagcaggtgcttcataaatttctcttgatttgatacctacaagtctattttctacatggtcaattcttccgataccatgcttaccagctaatgcattcaacgttaaaattaaatcgtctaattcatatgttttgccatcaatttgaactgggatacctttatcaaacgttaaaatgatttcatcagcagtatctggtgtttcttctaaagcatttgttagatcgaacgcatcctctggtggcacagcataaggatcttctaaaataccacattcattcgctctgccccataggttttgatcgatagaataaggtgaatcatgattgattgatacagggatattatgtttaattgcataatcaatttcttcttcacggctccatgcccactcacgcacaggtgcgaatgctttcaaagatgggtttaatgctttaatggcaacttcgaaacgtacttggtcattccctttaccagtacaaccatgtgcaatacctactgaatttgttttctcagcaatctctactaattttttagcgattaatggtcttgataaagcagaaactaatggatatgcattttcatacattaaatttcctttgattgcataacttacatactcatcactaaattcttttgtggcatcaataatatgacattcaacagctcccatatctaaagcttttttataaacgatgtctaaatctttaccttcaccaacatctaggcaacaagctacaacgtcgtatcctttgtcgataagccattgaacggccacacttgtatctagtcctcctgaatatgctaaaacaattttctctttcataaaattcacctcattgtagttatctgaatatttcgtatgaacacatgatagcaaacttttaatgaaaataaaaccattattttacatatttattcataaaatgcgatagaggtagttagagttgtaagtataaatgcttatttatcaatatttaaaagtgttttaaaaaacatgcaaattgtataaaaaatgtttgggtgtttgacgccagtttgaaatgtttgttgaaaaataggtgtgaaacgtcacataaatatcaattttattgattaagtacaaacttgtgaattgaatcgcaaacgtaaacttagtaaaattaagatattaaatgaaacaggaggcttttatagatgactcatattcaattagattttagtaaaacgttagaatttttcggtgaacacgaattaaaacaacaacaagaaattgttaaatcaattcacaaaacaattcatgaaggtactggtgcaggtagtgacttcttaggctgggttgatttaccagttgattacgacaaagaagaattttcaagaattgttgaagcatcaaaacgcattaaagaaaattctgatgttttagtagtcatcggtattggtggttcttacttaggtgcacgtgcagcaatcgaaatgttaacgtcatcatttagaaacagcaatgaataccctgaaattgtatttgttggtaatcacttatcatcaacatacactaaagagttagttgattatttagcagacaaagatttctctgtaaacgttatttctaaatctggtacaactacagaaccagcagttgcatttagattgttcaaacaattagttgaagaaagatacggtaaagaagaagcacaaaaacgtatatttgcaacaacggataaagaaaaaggtgctttaaaacagttggctacaaacgaaggttatgaaacgttcatcgtacctgatgatgtaggtggaagatattctgttttaacagcagtaggattattaccaattgcaacagctggaattaacatcgaagctatgatgattggtgctgcaaaagcacgtgaagaattatcttcagataaattagaagaaaacattgcataccaatatgcgacaattcgaaacattttatatgcaaaaggttatacaacagaaatgttgattaactatgaaccatctatgcaatactttaatgaatggtggaaacaattatttggtgaatcagaaggtaaagacttcaaaggtatctatccttcaagtgccaactacacaactgatttacattctttaggtcaatatgtacaagaaggccgtcgtttcttattcgaaacagttgtaaaagtaaatcatcctaaatatgatattactattgaaaaagatagtgatgatctagacggattaaattatttagctggtaaaacaatcgacgaagttaacacaaaagcattcgaaggtacattattagcgcatactgatggtggtgttcctaacatggtagtgaacattccacaattagatgaagaaactttcggttatgtcgtatacttcttcgaacttgcttgtgcaatgagtggataccaattaggcgtaaatccatttaaccaacctggtgtagaagcatataaacaaaatatgttcgcattattaggtaaacctggttttgaagacttgaaaaaagaattagaagatcgtttataaaatatattacttcaatgattagtaaagtttgaaaagatagaactagatgttaactatttaaagcatatttccgaggttgtcattacaaatgtaaaaatgtaatgacaacctcgtttttatttatatgcaagaactaggttactagctaatgtgacaagatgttaagagaaaattaaagataaaataatatctgccatacaataatattgttatactactagagactgatttattagcatgattacatgttaatgtttctttacttagtaattaactttataatgtaagaataattatcttcagccaaagaaagggattgatgatttgtcgtttcatcaagtagaagaatggtttgagatatttcgacagtttggttatttacctggattcatattgttatatataagagcgattattccagtatttccattagcactctatattttaattaatattcaagcctatggacctattttaggtatattgattagttggcttggattaatttctggaacatttacagtctatttgatctgtaaacgattggtgaacactgaaaggatgcagcgaattaaacaacgtactgctgttcaacgcttgattagttttattgatcgccaaggattaatcccattgtttattttactttgttttccttttacgccaaatacattaataaattttgtagcgagtctatctcatattagacctaaatattatttcattgttttagcatcatcaaagttagtttcaacaattattttaggttatttaggaaaggaaattactacaattttaacgcatcctttaagagggatattaatgttagttgtgttgattgtattttggattgttggaaaaaagttagaacagcattttatggggtcgaaaaaggagtgacatcgtgaaaaaagttgtaaaatatttgatttcattgatacttgctattatcattgtactgttcgtacaaacttttgtaatagttggtcatgtcattccgaataatgatatgtcaccaacccttaacaaaggggatcgtgttattgtaaataaaattaaagttacatttaatcaattgaataatggtgatatcattacatataggcgtggtaacgatatatatactagtcgaattattgccaaacctggtcaatcaatggcgtttcgtcagggacaattataccgtgatgaccgaccggttgacgcatcttatgccaagaacagaaaaattaaagattttagtttgcgcaattttaaagaattagatggagatattataccgcctaacaattttgttgtgctaaatgatcatgataacaatcagcatgattctagacaatttggtttaattgataaaaaggatattattggtaatataagtttgagatattatcctttttcaaaatggacgattcagttcaaatcttaaaaagaggtgtcaaaattgaaaaaagaattattggaatggattatttcaattgcagtcgcttttgtcattttatttatagtaggtaaatttattgttacaccatatacaattaaaggtgaatcaatggatccaactttgaaagatggcgagcgagtagctgtaaacattattggatataaaacaggtggtttggaaaaaggtaatgtagttgtcttccatgcaaacaaaaatgatgactatgttaaacgtgtcatcggtgttcctggtgataaagtagaatataaaaatgatacattatatgtcaatggcaaaaaacaagatgaaccatatttaaactacaatttaaaacataaacaaggtgattacattactgggactttccaagttaaagatttaccgaatgcgaaccctaaatcaaatgtcattccaaaaggtaaatatttagttcttggggataatcgtgaagtaagtaaagatagccgtgcgtttggcctcattgatgaagaccaaattgttggtaaagtttcatttagattctggccattcagcgaatttaaatataatttcaatcctgaaaatactaaaaattaatatgaaacaaatacaacatcgtttgtcggttttaatactgataaacgatgttttattttgttagtaccacaataaaagtaaagttcgatatgaacttataataaatcaatcacaatcactttgtgttaaaatatgtgtcaaaggaagtgagggtttgtcatgacattacatgcttatttaggtagagcgggaacaggtaagtctacgaaaatgttgaccgaaataaaacaaaaaatgaaagcagatccgcttggagatccaatcattttaattgcgccaactcaaagtacatttcaattagaacaagcctttgtcaatgatccggaattaaatggtagtttaagaacagaagtgttgcattttgaacgattaagtcatcgtattttccaagaagttggtagttataatgaacaaaaactatctaaagctgctatggaaatgatgatttataacattgttcaagaacaacaaaagtatttaaaactttatcaatcacaagcaaaatattatgggtttagtgaaaaattaacagaacaaattcaagattttaaaaaatatgcagtaacgcctgaacatttagaaagctttattgctgataaaaatatgcaaactcgaactaaaaataagttagaggatattgctttaatataccgtgagttcgaacaacgcattcaaaacgagtttattacgggtgaggatgcattacaatattttattgattgtatgccgaaatcagagtggctaaaacgtgctgatatatatattgatggttttcacaacttttcaacgattgagtatttaataatcaaaggattaattaaatatgcgaagagtgtcacaattatattgacgacagatggtaaccacgatcaattcagtttatttagaaaaccatcggaagtgttacgacatattgaagaaatagcaaatgaactcaatatttctattgaacgtcaatattttcaaccaattatatcgctttaataatcaagatttaaagcatcttgaacaagaatttgatgcgcttcaaatcaatcgagtggcatgtcaaggtcatatcaatattttagaatctgcgactatgagagaggaaataaatgaaattgcacgacgtatcatcgttgatattcgtgataagcaattacgatatcaagatattgctattttatatcgtgacgagtcttatgcttatttatttgattccatattaccgctttataatattccttataacattgatacaaagcgttcgatgacacatcatccggtcatggaaatgattcgttcattgattgaagttattcaatctaattggcaagttaatccaatgctacgcttattgaagactgatgtgttaacgacatcatatctaaaaagtgcatacttagttgatttacttgaaaattttgtacttgaacgtggtatatacggtaaacgttggttagatgatgagctatttaatatcgaacattttagcaaaatggggcgtaaagcgcataaactgaccgaagatgaacgtaacacatttgaacaagtcgttaagttaaagaaagatgtcattgataaaattttacattttgaaaagcaaatgtcacaagcggaaactgtaaaagactttgcaactgctttttatgaaagtatggaatattttgaactgccaaatcaattgatgacagagcgagatgaacttgatttaaatggtaatcatgaaaaggcggaagaaattgatcaaatatggaatggcttaattcaaatccttgatgacttagttctagtatttggagatgaaccaatgtcgatggaacgtttcttagaagtatttgatattggtttagaacaattagaatttgttatgattccgcaaacattggaccaagttagtattggtacgatggatttggctaaagtcgacaataagcaacatgtttacttagttggaatgaatgatggtacgatgccacaaccagtaactgcgtcaagcttgattacagatgaagaaaagaaatactttgaacagcaggctaatgtcgagttaagtccaacatcagatattttacagatggatgaagcatttgtttgttatgttgctatgactagagctaagggagatgttacattttcttatagtctaatgggatcaagtggtgatgataaggaaatcagcccgtttttaaatcaaattcaatcattgttcaaccaattggaaattactaacattcctcaataccatgaagttaacccattgtcactaatgcaacatgctaagcaaaccaaaattacattatttgaagcattacgtgcttggttagatgatgaaattgtggctgatagttggttagatgcttatcaagtaattagagatagcgatcatttaaatcaaggtttagattatttaatgtcagcattaacgtttgacaatgaaactgtaaaattaggtgaaacgttgtctaaagatttatatggtaaggaaatcaatgccagtgtatctcgatttgaaggttatcaacaatgcccatttaaacactatgcctcacatggtctgaaactaaatgagcgaacgaagtatgaacttcaaaactttgatttaggcgatattttccattccgttttaaaatatatatctgaacgtattaatggcgattttaaacaattagacctgaaaaaaataagacaattaacgaatgaagcattggaagaaattttacctaaagttcagtttaatttattaaattcttcagcttactatcgttatttatcaagacgcattggcgctattgtagaaacaacactaagcgcattaaaatatcaaggcacgtattcaaagtttatgccaaaacattttgagacaagttttagaaggaaaccaagaacaaatgacgaattaattgcacaaacattaacgacaactcaaggtattccaattaatattagagggcaaattgaccgtatcgatacgtatacaaagaatgatacaagttttgttaatatcattgactataaatcctctgaaggtagtgcgacacttgatttaacgaaagtatattatggtatgcaaatgcaaatgatgacatatatggatatcgttttacaaaataaacaacgccttggattaacagatattgtgaaaccaggtggtttattatacttccatgtacatgaacctagaattaaatttaaatcttgggcagatattgatgaagataaattagaacaagatttaattaaaaagtttaagctgagtggtttagtgaatgcagaccaaactgttattgatgcattggatattcgtttagaacctaaattcacttcagatattgtaccagtcggtttgaataaagatggttctttgagtaaacgaggcagccaagttgcagatgaagcaacgatttataaattcatccaacataataaagagaattttatagaaacagcttcaaatattatggatgggcatactgaagttgcaccattaaagtacaaacaaaaattgccatgtgctttttgtagttatcaatcggtatgtcatgtagatggcatgattgatagtaagcgatatcgaactgtagatgaaacaataaatccaattgaagcaattcaaaatattaacattgatgatgaatttgggggtgagcaatagatgacaattccagagaaaccacaaggcgtgatttggactgacgcgcaatggcaaagtatttacgcaactggacaagatgtacttgttgcagccgcggcaggttcaggtaaaacagctgtactagttgagcgcattatccaaaagattttacgtgattgcattgatgtcgatcgacttttagtcgtaacgtttacaaacttaagtgcacgtgaaatgaagcatcgtgtagaccaacgtattcaagaggcatcgattgctgatcctgcaaatgcacacttgaaaaaccaacgcatcaaaattcatcaagcacaaatatctacacttcatagtttttgcttgaaattaattcaacagcattatgatgtattaaatattgacccgaactttagaacaagcagtgaagctgaaaatattttattattagaacaaacgatagatgaagtcatagaacaacattacgatatccttgatcctgcttttattgaattaacagagcaattgtcttcagatagaagtgatgatcagtttcgaatgattattaaacaattgtatttctttagcgttgccaatccagatcctacaaattggttggatcaattggtgacaccatacgaagaagaagcacaacaagcgcaacttattcaactactaacagacttatctaaagtatttatcacagctgcctatgatgctttaaataaggcgtatgatttgtttagtatgatggatggcgtcgataaacatttagctgttattgaagatgaacgacgtttaatggggcgtgttttagaaggtggctttattgatatatcttatttaactggtcacgaatttggcgcgcgtttgcctaatgtaacagcgaaaattaaagaagcaaatgaaatgatggtcgatgccttagaagatgctaaacttcagtataaaaaatataaatcattaattgataaagtgaaaagtgattacttttcaagagaagctgatgatttgaaagctgatatgcaacaattggcgccacgagtaaagtaccttgcgcgtattgtgaaagatgttatgtcagaattcaatcgaaaaaagcgtagcaaaaatattttggatttttctgattatgaacattttgcattacaaattttaactaatgaggatggttcgccttcagaaattgccgaatcataccgtcaacacttccaagaaatattggtcgatgagtatcaagatacgaaccgagttcaagagaaaatattatcttgtatcaaaacgggtgatgaacataatggtaatttatttatggttggagatgttaagcaatccatttataaatttagacaagctgatccaagtttatttattgaaaagtatcaacgctttactaaagatggagatggcactggacgtcgaattgatttgtcgcaaaacttccgttctcgaaaagaagtactgtcaacgacaaactatatattcaaacatatgatggatgaacaagtcggtgaagtaaaatatgatgaagcggcacagttgtattatggtgcaccatatgatgaatcggaccatccagtaaacttaaaagtgcttgttgaagcggatcaagaacatagtgatttaactggtagtgaacaagaagcgcattttatagtagaacaagttaaagatatcttagaacatcaaaaagtttatgatatgaaaacaggaagctatagaagtgcgacatacaaggatatcgttattctagaacgcagctttggacaagctcgcaatttacaacaagcctttaaaaatgaagatattccattccatgtgaatagtcgtgaaggttactttgaacaaacagaagtccgtttagtattatcatttttaagagcgatagataatccattacaagatatttatttagttgggttaatgcgctccgttatatatcagttcaaagaagacgaattagctcaaattagaatattgagtccaaatgatgactacttctatcaatcgattgtaaattacattaatgacgaagcagcagatgctattttagttgataaattaaaaatgtttttatcagatattcaaagttaccaacaatatagtaaagatcatccggtgtatcagttaattgataaattttataatgatcattatgttattcaatactttagtggacttattggtggacgtggacgacgtgcaaatctttatggtttatttaataaagctatcgagtttgagaattcaagttttagaggtttatatcaatttattcgttttatcgatgaattgattgaaagaggcaaagattttggtgaggaaaacgtagttggtccaaacgataatgtcgttagaatgatgacaattcatagtagtaaaggtctagagtttccatttgtcatttattctggattgtcaaaagattttaataaacgtgatttgaaacaaccagttattttaaatcagcaatttggtctcggaatggattattttgatgtggataaagaaatggcatttccatctttagcttcggttgcatatagagctgttgccgaaaaagaacttgtgtcagaagaaatgcgattagtctatgtagcattaacaagagcgaaagaacaactttatttaattggtagagtgaaaaatgataaatcgttactagaactagagcaattgtctatttctggtgagcacattgctgtcaatgaacgattaacttcaccaaatccgttccatcttatttatagtattttatctaaacatcaatctgcgtcaattccagatgatttaaaatttgaaaaagatatagcacaaattgaagatagtagtcgtccgaatgtaaatatttcaattatatactttgaagatgtgtctacagaaaccattttagataatgatgaatatcgttcggttaatcaattagaaactatgcaaaatggtaatgaagatgttaaagcacaaattaaacaccaacttgattatcaatatccatatgtaaatgatactaaaaagccctcaaaacaatctgtttctgaattgaaaagacaatatgaaacagaagaaagtggcacaagttacgaacgagtaaggcaatatcgtatcgggttttcaacgtatgaacgacctaaatttctaagtgaacaaggtaaacgaaaagcaaatgaaattggtacgttaatgcatacagtgatgcaacatttaccattcaaaaaagaacgcatatctgaagttgagttacatcagtatatcgatggattaatcgataaacatattatcgaagcagatgcgaaaaaagatatccgtatggatgaaataatgacatttatcaatagtgagttatattcgattattgctgaagcagagcaagtttatcgtgaattaccgtttgtagttaaccaagcattagttgaccaattgccacaaggagacgaagacgtctcaattattcaaggtatgattgacttaatctttgttaaagatggtgtgcattattttgtagactataaaaccgatgcatttaatcgtcgccgtgggatgacagatgaagaaattggcacacaattaaaaaataaatataagatacagatgaaatattatcaaaatacgcttcaaacgattcttaataaagaagttaaaggttatttatacttcttcaaatttggtacattgcaactatagtattttgattttcaaaagaataaaaaataatttcgattaagtgcaaagtccttgtagcagaatgaacacaactcattttcaaaattgtcttacttatttatttgttatttgataacgaaaaaagttataatgtgaattaagataaagatgaggagttgagaatgaatgaaattcttatcattcaagtataatgacaaaacttcatatggcgttaaagtaaaacgcgaagatgctgtatgggatttaacacaagtatttgctgactttgcagaaggagatttccatcctaaaacattgttatctggtttacaacaaaatcatactttagattttcaagaacaagtacgtaaagcagttgtagcagcagaagatagcggcaaagctgaagactataaaatttcatttaatgacattgaattcttaccaccagtaacacctccgaataatgtgattgcttttggtagaaattacaaagatcatgcgaacgaattaaatcatgaagtggaaaaattatatgtatttacaaaagcagcgtcatctttaactggagataatgcaacaattccaaatcataaagatattactgatcaattagattatgaaggtgaattaggtattgttattggtaagtctggtgaaaagattccaaaagcattagctttagattatgtttacggctatacaattattaacgatatcactgatcgcaaagcacaaagtgaacaagatcaagcatttttatcaaaaagtttaactggcggttgcccaatgggtccttatatcgttactaaagacgaactaccattacctgaaaatgtaaatattgttacaaaagttaacaatgaaattagacaagatggtaacactggcgaaatgattcttaaaattgatgaattaatagaagaaatttcaaaatatgttgcactacatccgggagatattattgcaactggtacaccagcaggcgttggtgcaggtatgcaaccacctaaattcttacaaccaggtgatgaagttaaagtgactattgataatattggaacgctgacaacttatatcgctaaataattatcatttaaaaagctaaccagtctttatatagattggttagttttttcttgcttttcttaaaaggtgttaaagatcattgtttataatgttaccattttgagacgaaagtgaaatattgatattaagaagtagttgattattatacagtagatgcacagtattctaataagtaataaaatgtcatgttcttcctctaaaatatagaagtgtggtaaaatatatatttgtgtatgaacaaataatgattaaattataagaaagtgggtatttatcccacgaagttttaatttaataactaaaattattaaagtgggggaattaatatgttacatttacatattttaagttgggtattagcaatcattttatttatcgctacatacttaaatatttcaaaaaatcaaggtggtacgccatatttcaaaccattacatatggtactacgattatttatgctgttgacgttaatttcaggattttggatattaattcagtcatttatgaatggcggggcaaatcatatgttgcttacattgaaaatgctgtgtggtgttgcagtagttggattgatggaagtgtcgattgctaaaagaaagagacatgaacaaagtcacacaatgttttggataacaattgcattaattatcatcacaatggtattaggtgtcattctaccgttaggacctttatcaaaattattcggtattggctaattgataagacatatagtatatgacataaggcatggacaattattagtccaagaccttatgtcttttttgattctaaaaatgtttaataagaaacaaagtataaatttctaattatctttttatattttcttaaatgctcgtaaagccttattctatgtgctttcgagtatttttactgtaggaagatacttcacgtttctttgcatatttcctcatgtcttagctgtcagaagtggtaaataagtagtaaattcatttgtactactaagcaacaagacgctcctgttgcttctctttattcaagcgtttcatttctgccattgcagaatcgaatgttgcatgtgcgtaatagttcagcgtcatggctatattagcatgtcccataatgtactgtaatgcctttggattcattcctgcatttgcatagttggtacagaatgtatgtcgcaaactatgtggagtgatgtgtggcaatttatcctcgttatacttattgtatttcttaacaagacctttcatcatgccgttgtaatcacttgccacttttggatagttctttctattaagaaagaggaaatcactatatccatcaatctcaacacgcttatcattctttcgattcgctaacactcgcttaaatgcttgataggcttcttcaaccataggaacttgacgttcgccacttttggtctttggtgtttcaatgtagtacccaatttcagtatctctcaatagctgatggtctatattgacaagacgattctcaaaatctaaatctggaagtgtcaaaccaccaaactctgaaatacgaagacctgtttttaagagtatcagaatttcatcataatttttgctgtaggttttatcagcttttgcaaaggctaacagtttttcttcctgttcttctgttagtacggtcttagggacagtatcatcatcaagaactgctttcagttgaaagtcaaatggattcttccgaacacaatcatcttgtatagcaatatagaatgaagcctttaaagaacgtttgtagttattgatggtttgataagcataaccattttcactcattctaatagcccattctttagcgtctgatggcttaatactgtcaatacttcttacacctaacttgtctttcttcaaaatatccataagatatttgcgtccagtttcagtgttttttctaacctttggtctttgagcgttctgttttgcgtaaagctggcagagtgtcattttctttcctacaacatcaataccatcatgaatgtctttctgtaactctgcgattttctctctaagtgagatacaatcacgctttcctgctggtactcggtctgtagccacaagtttccacgagtaaacaaattgcggttctccaaatgaatctatatatttgtataagtatcttccgtcttttcgttggctctctccagtctttaagattcgacctttattgtcacgtcttttttctgacatggcatttgctcctttcctttatggaaagagccttgatacgacttaatactattttatcatatacaagaccctttggcgacgctagattgcgtccaatgtatctataattttttcaaattgttttcgtttaatctgaatacgattgccattcataatcagccaatttgcatttttattttcctctgccaagcgtcgtagcttgttttcgccaatacgaaaatattttgacgcttcttcaatggttagggtataacgttcccaaataggaatgtcagtctgcttcataaaatcctcctttccaaatcacttatttggatttcataaaagttgttttaccagcaatcgaacagctttagcaaagctcacgggagttccacccctgcatggttctcatgtagccatactcattgcctgcgacggttttatcacgctcggactattgactgtatgggagtatcattatcacgataagaatgtcgttgcaggcaatcctgctaaagattgcttctcggatcactaacatgaatcgctcgctatctttataagataggtcatggcggttagttccgttggctcttttcttatcgaaacgtattcgattacttttattcagttttcaaagaacaatggctcgttagcctatcaaaacacattgaaagctcaatatgctttggtggaataacaaacctccctgttcgggaagcgtggaatggtttagcacgcttccacgaaaggagagaggatattacttaatttcaaatgacaaaatctttgtaatcagtctggtttccattcttccacgtaagacttcatcaacgaccatactttgattgccatattcatctttcataagtcgtagggaacgcttcgttatgtaccctctgtaatgatgtagaatctggttaatcgcttcggtatcgccatctgttgcctttacaatgagaggaaagggaatcataggatattgtgttttcattcttcaaattcctccataaactttttaattaaggctagtccactggttctatgccgatagacagtagaacggttcaatttcaacaggtctgcaatttctgaatcgctcatgtccataaagtaaaacagcagtagaatttcacgtttcttgtctggcaactcacgtaatgcttcactcaacaaatcattttcaacgcctactgataacccattgagtgtaaaaatctgaaagtcagttgaatagttatctgttgtcgcaaactggctaacaagataatcgccaacatccgaaaaggacacctcacgctttgcaatccttgaaagataaagcatataattctttcgctcgtcttccatagcacgtttacagatatagtcaaactgattttctattgtggtctgaaaagaagatggtttcatgtttctcaccccctttctgtctaggaaaggaagtgagccttgctcgtttatctcctttcactcttagtcccaatgtgaaagggggatttgttgcattactgataaataaactttgtaaaaaagttctgaatagccaaaaaagcatataaacagatttatttctctgtttacatgcttctgttattctatctatatgatttataaaaccacattggtggacgtacttatctattgcagatagacgactttttttgacaagaacccaatgtaaggaaatttattgtatatgatgtacttcatggcgacgttgacctccaacaaaccgccatttggaagtaatatacaatattttaacagcgtaaatagcactaccatataacggttttttttattggcgtttagtagtgctttttattaaatataaacctataaaccatataacacgtttttctatacctgtttttaattcagtaggaacaataaaatgtatagaggtggtctactatgcgtaaaaaagaagataaatatgattttagagcctttggtttagccattaaagaagctcgattgaaacgaggtttaactcgtgaacaagtgggagcattgattgaaattgacccacggtacttaactaatattgaaaataaagggcaacaccccagcatacaagttctttatgaccttgtatcgttacttcatgtttccgttgatgaatttttcttacctgctaataacttggtaaaaagcacccgacgattacagatagagaaatacatggatagctttacagacaaagaactatccttaatggaatctttagccagcggtatcaacgaagcaagaaacatcgaagactaattaaaagaatccatacataacggaaagagccgataaaatgagattgtattaatctcattttatcggctctgcgtctttgcgtctggctctgtaatcacagttactttgaactgctttatttcaattaaattttcttgtctgcatttcggacaatagagggggaatttttttaattcagtatcttcccttatctttaatcgtgttttatttccacatacaggacacaatatccacttgtagtttataataactatctcctcctttacactttaattcaaatctttattaaaaaatatttcatcttatttaacaagaaaccatatttatataacaacataaaatacactaagttattttattgaacatatatcgtactttatctatccgactatttggacgacggggctggcaaacaggttcaccggtagtaacatggtacccttttaactctgttaaacaaacactacgtccatttgtaaagaaagttaaatcactacgatattcttgaatacaccgagcagggatttctccactaagaatgacctcattatttttcaattgagtgtctacgatgttcgcacaatatttaggagcatcgttgtatgctcgtgaaagatattcctgtggcgcataaattttaaaactaagatatggctctaacaattctgttccagctttttttaagacttgttccaatacaataggagcaagcatccgaaaatctgctggggtactaacagggctatagtataagccatacttaaaacagattttacagtccgtcacattccaaccatacaatccttgttcacagccatagcgtatcccctccataactgcattttgaaacgattgatttaagtatccaagagaaaccgagctctcatactgcattccacttcccaacggaagcggtgatacagataaaccaatggaagcccagaaaggatttggcggcacttcgatgtgaatggtatattctgcattttttaacggtctctccatataaatgactgtaggctcttttagttctatctccacatgatacttttcttgcaacagtgcactaatcacttccatttgtactttccctaagaaagaaagtataatttcatgtgtcgtagaatccacgtaatatcgtagaagcggatcactatctgagatttccaaaagggcatcaagcaacatttctctctgttcaggtttactcggttcaacagttgtttgtagtagagggtgcggattttcaatcttttttctctgtggcaatagttttgtatctccaagaacactatttaacttcaaaaactcattttgcaaaataacaatttctccagaataagctctatcaatcttacataattcaccatttattgaagtatacatttctgtaacttttattttttctttttctgatactctaaccgaatctcgtaaatgtagtactccactataaaggcgtatatatgcaagacgttgtcttttttttgtatattcaattttgaaaacatttccgcaaagttcagacggacctcgatgtgttgatgaataaaatttattagtaataacttctataaggttatcaatccctatattactttttgcacttccatgataaagagggaacagagaacaattctgaaatcttatgctttcctcttgttcgagttccaatgcttctaatgatttaccggacatatatttctctaaaaggtcatcgtttccctctattaccgtatcccattgttcagattcggtaaagttcgtcacacacatattaggatacagttctaccttctgtttgattacaatttcggcagaaagtttctctttaatatcctgataaaccgttgataaatcaattccattttggtcaatcttattgataaaaaagattgtgggaatccccattttcctaagtgcatgaaataatatacgagtttgtgcttgtacgccatcttttgcagaaatcagtagaattgccccatctaaaactgataatgaacgatatacttctgctaagaaatccatatgtcctggcgtgtctatgatgttcaccttcgtattttcccactgaaaagaggttattcctgtctgaattgtaattcctctctgacgttctaaaagcgtattatccgtcctcgttgtacctttgtccacgcttcctaattctgtaatcgctccactgttatataataagctttctgttaaggtagtttttcctgcatcaacatgagctaaaactccaatattaataattttcatgtgattttcctccaattacaaaaaacccaaaagggcaataaaaatcccagtgataaatacttttatcactgggatttttatgcataaccataggcatacaaagcatacagatattctccggatactttagaatcacatgataaaggtattcttaaactgggtacaaaaaactaagccctcctaaaaaaggacatccaattatttgttcccactatcaaattgacagtttatttaagaataccttgccgcatatttattaactccttttaaatagatacttaaataatagcacgtaagagcatatttgtaaaggaatctccaattttttatcaaagagagtacgtgattacaaaatagctgtaataatgtaccaatatttgttattctataatcttccaattactcccgttcttttcaagtaccaaatcaaattgagatacctgcgttgctttggtctgctggtcgatatactccactgtcagcgataccgtgacttgattatccttacgattgtgaataggatttaccagttcttgaaagatgtactcttttccgattggttttaatatcccgtcattcacatagtaggaaagttcactggctgtcgctgtaggatagagcttgaagaacgtcgttaaaaactcattgatttcattggttgtaatggaatcaaccgtcccctcactttcaatggcttttggtttataacttgatttcttaggtatgttggtaatggtcggattcttaaccagtaccatatttccagaaccatctacatagacactcactatataagcagagtggacggtctttgtattttctccctctgtaatgagctggtctacactgtaggttacattaaactcattgtcgccagttggctctaccgtccatatctgaaatcctcttacagaagacgatacaggaatatctttgcgtactgtatcaacattgagagcttgaagttcatctgtcagatagccttttagactttccattcgattatcaatggacttatcggattgctcccatgaatagtagactttcgcaaagttctctacaaaattttctacatgatgagtatcaacgtattccttttctatgatagttgtttcgtgaatagtatgagtatctatagctgtaaagtgcttgaatatcgcaaagctgaaactaagccctaaaagtacccacaaggcaatcacaacctttttatgaggattgaccttatagacacgaggtttcttttcctttggtatctgtttttctttattctgattttttctaaatttcatcattaaatcttcctttctcattgtttgattcgtcctgctcccactaaatgctgttgccagtaggggcttgttaagtcggcataaccgattgggtcgcctgcatgaaacatacggttattgccaaggtatatcccaacatgagtaatataagagccagcgttataggtagaatgaaagaaaaccaaatcgccagcttgtgcttccgatagtgggatatgctgggtcacatcatattgctgttgtgcggttcgtggtaagttaattccagcttttccatacgtccattgtgtcagtccgctacaatcaaaagaagtagtcggggaagctccaccgtaaacgtatcgccagccctcatatttcagtgcttcgtccatgatggcttgtaccgtatcatcatcaaactctgttgtgacaagatactgcgttaccagttgcacataaaacatattgccatagttgtatcgccagcccccattgataggtatggctatgggattggggtaagacactttttcgccacctgaatactcttttgagaaactttgagccagttcaaaggtatatttatttccacgattagccacataccctaagaaaccaccaccataattgtaggactggataaccgattctaaatctacactgagcctttcgctactggctaataattcactgaaatacttcacaccttgcttaatggattcttctgtactcaatgaattaggtggaagaccgagggattccgaggactgcataacatcttccgcagtaccgcccgattccacctgtataatcgcaagaagtatgttgacatattcttcaacgccatattctttggcatatttttctaccataggcttatgagccagcacttctgcggaaacattcacacctccataatgaatattggaaattccgctgtcctgttcatctgaaaataaaatggcaacaaacagaagcagtgagaagaccatcaagaataatccagaaccaccaatcactaaagttttcaacttcatggtttcttaccgactttcttaatggtggcggttttgattggtggtctacttcttgtattttgtagtggtactctttgaacagtagacggacgttcttttgtgattggacgttgtgaagttctatctgctgtagtggttgaagttgctggcttttgaacggttttttcttgaacggtattgccttggcgttccacttttggacttgaaaaatcggacttaactgctggacgctcttgtttggcttgttgagattccttatatgaagtctgaatattagactgttttgaggtctgttcatcatgatattgttcttgtcttgtagtcggtctttcatgaacagaagaagcaggctgttttttctgtttgacctgttccatttcagagcgacgcttcgcaatggtttttcgcctttgttcctgctgttccttgcgtccactggctctgtccgctttggtttgagaaatactactggttaaatcacggacattctcttttactttggattttccttgatatactgcatatcttgcattggtcggcaaatctttaacctgttctttcaaaccactagcagtgtctaccattctgtctttggtatcagctactgtaccgatggtttgaccgatacgttttccaagtgttgatttttcctttccgtctggtcgggagtgatctgcttgtgtccttgcagaactccccgaacccgactgtccttttttacctgtaacaatggcagacccagcccctagagtagtcatggaacgtccaagtttccgctgtagacggtgcatgtgagcgtgcataagcatacgaggttttctcatcacacgacttcccacactttgagaatcgttactctgtagagaaaacatactcattaaatcgcccagcttgaagtagattcctgcaaaggtcacaatctgtagaaaagcaatcaaaaagaacggataaccagccgataaggtatagagcatggttgaaatactaaatgctgtcgtaataatcaatgtgattccagctcgtgtcaaaatggtattaaagagctttgttatggctcgttttgacataccatcaaatgatggaatcatgcttaaaataaagctcacaggcagaaacatagcatagatgataaaaagtacctgcgagaaaatcatgattcctgttaataggaatacaaatatggaaatcccaatattgaagacaaataggaagaagactgtacctaaacggttaatggtctttgtaatggttagattggtattgcttctgtcttcaatttcttccgcaacaattttttctctgtcttcgccattgttggaatctgggctggtggagagcaggctttccacacggtcaataccgatactttcaatgtctgaactgttgtattgaagcagtagccacggttgctgaacctgtatggaaaacaggctatctctgattaagtccacgctgtccttgccttgactatcggaatggggcatgacaatcttcgtgccaagtgataaactggcattactgatgtctgatgaaaagtcattgatttttttaatgtagtcgggagcgtaggcaataaaggaagccgataggataaacaccagcacaaaattcataatggcatgaattgcctttgtggtttctctctttatcagtcccgtataggcaacataaaccccaagaaccaaaatcaagagtaagaggaatccaacatagaaaccctctgttgaaaatccgtttgcactcacaccagctaaggtctgcatattcttaccaatggaatctgctgtagcggaaatgaagtctaaggaataggcttcctgtactaagtaacctgtcgcattggaaacatacaaactgattgtccaaataaaattggtaatggcatatagtccatacatgacctgttttccaatcccgtccgaccagttccacggaagacagccccagctattatccacataaaaatccagttgatagttttcaagtgggtatcggctgtattcatttgccacattgaccgtatcatctaccaagcccgcagcttgaaccaccgttcccagcatggctaaaagaaaaatggcaatcacaagtgtgaaagccactgtcattgccactttacctagacgtttcagcgtccagtttgattttattctgtttactattgatggtttcacatttacacctcttttcgcacaggtggtctggtatcaaaggcatggagcagttcttcaaatacagggtggaactgtatcacaccgacacgaccatataaatcactgataaggcattgcccgttttccaaatcacgcaatcgcttctgattgttttcgtcctctgggtctacaccaaaaaaggctaaggtctttttaatctcgttaaggtcagtggaacgaaatgcaaattttaagccgaggttatttttcagtttttcatctaagaggtcgtctgtattttgggtcacgaaatataccccagcgttcatagcacgaccagcccgaaccagcttcatagatagtgtttttccttgtgctacctgtaaaaagctccatgcttcgtctaaatctacaatcttgaaaatgcttcggtctgtatggataaagtctaaagcaaaggtactaatgacaatcagcatagcaacggataaaagctccatagtggtatattcctcaaaggaagtttccttgtcgggaagtaccaagtccgcaacctgtataatgttcagttgtttttctaagctgatagactgctccacataaccattactgaataataaatgtgcaaagtcatagtctgtaaaactttcgatatggtcggctatactggtacttagtggcgtattctcaacccgtaattcctcaatcactttcatcaaccctcgtacttcactattggttactgcacgaatggcttttctaaggattgggaagcgttccccatcacgagaggaaatccccgtaaggaatgtcagaatatcaatagccagtgattcagaatctttgggatttttcataatcacataagggtcaagtaagcctttgtttttctcatcagaagtcagagtgacgatattgatttcatgggaaatctctggcaaggtttctttccatctgccacgttctgcttttgggtctacaatcactgcttgtgccccataaagcaccgcataatagacgataaggttattcgcaaaggatttaccaccacccagcgaaccaacaaaagccgacgctaacgcattggttactgaacccttaaccccttgactggcaagagcaggtttcagatagacattgcgtccagtatctaagctgtagccaacataaatcccctcattttcccccagcatttgagtagcaccaaaacctaaaccagcgaggaaatcagaggtcacgtattgaatataatcattcatataacgcttgctggcaggtaaaaattcttcatgtaagccgagcatatccccaaatggtcgtaccagttttacgcttaaatcgtcataaaaatctttcacttcattacaacgacgtttgagttcgtcaagatcatttgctgatacccttaccacataagacagcttgtacatagattccttgctttggtctaaattggtttccagctcattcacactttccagagcttccgccacattggagctggtttcattatcactttgccaagcgtggttatccaagtctttcagttctttctttttattgcggacagtagatagggctttacgattcgctacaatttccacattcattgacgtatcaatcgggaatgtaaattgctgttgctggtagtagaagatttcagaggacgggaagtccagttctccgacaatgctgttaatggtaaagtaagctacatagacggtttcatcttcctgctggattttcaaatatcgctgtttttcttccaccaaacagcgagtaggcttaatcaagtcatagtatttaatcagcgtttcattatccagctttttctttgatagatggtactcatactcttcataggcagtgcctgtctgtccgtaaaggtgttcaatcagatagccgaagtcgtccttatctaacctgcggattttgaaacgacgagagattttattttctaagagcttttccatcttctgaaaacgcaggatttcatcattactcatactaacaaaatcgcccatcagcttatggttcacatcatagacaaaatcagacaaagcattttttgcttcaacggtaagacttttcatagaaaactcctgatcgttgagaagcaacttaaagccgataaagaaacggtagttcacttgattttcgccaatcatggatattaaagcgtctgtctgttggtcgattttgtcataggcaaccgctttgagcttgccagtgacttcatttttggaacgctcttgtgcagaacgtatgctggattctgtactgatttgtaaagcatgaattttgccatcacgattttgtgcgataagctgtctgaaagaatcatgcacttgtattttctgttctggacttagaaatgagtaattgtaaggaacaagctcatagtaagcataacattccccgtctttattccagacgagattgttttcaatgtatttaattggatatgccataaaattcactcctaactgctgtaatggcttcttgtggctggtttctgccaagcgttactttttttcctgcataggtcagctttggtcgcagtgcataagcaatgacagacttcaaaaatccataaggctttttaccatcaaaagtttttgtagacataaaccatgtgaaagccacaggaatcccaaagtatttgagaaatgctccctctatcatggaaagagggggcaagttgccaagtatcatcactgcaaagagtgacacgacaaaccatgtcatttgcgtaaaggttatgggaaacggaagtctaaaatcattgatagaatacagtaccttttccacagaccagatactggtatagcttcgtattttcttcatgtaatcaatcctttcataaaaaataggggtagctgattgagccaccccgtaaaatagaaaatctgccagtagtaatgtaccgacagatttaatagacgatttcaaaaatcccatgattggttgagataaacgttcctgaaaggtctaaatcccgaccataggcttgataatcaatatagttttgaagactagctggtacttcgcctaaagcacccgtttcttcaatgtagtagcgtgccacgtcatacatatcatcacaatcggaatgaatgataatatcctcttgatgttcgcttagttcttcaatgcttgaaaaatgagtgagcagagcagatagctccgattgtaattcttcgggtaattccgataccatttcccatagtcgattgagttcgccaatggaagtgtattcgtcaaccgtaaagggtaactcgtagtcatgaatggcgtattcctcatattcatcattcaagccgattttctctttgacttcctcaaagtcaatgggaaaggtaaaccacgcaccgaccaattcgccctcattgtatttgcctaaattcgcaatatagacttgcatatcgtccatatattcacgtcctttctttgtagagattcaaaaatccctaccgcacttcgtttggtgtaccattcctttgcggaacataagaaaaccacttatattccacaaaagaacggttttatttaagcaccaataatgcgattgaatagctctagtaaaatgtcttttactccagcagcgttgaagactaagccaaccgcaataatcgcaataattaaaaagccaatcagtttgctaaactcacgcttgaagccaagatacaagccaatcacaacgattgctaaaagcaccagtgattgagcgtttgatagaaaccagttataaaggttttgtccaaaattcataaaaatgttctcctctctatattcaatgaatttgtatttgagttatttttttgttgttatcacgtcctgttcttttactgactgttgcttcaaaatctgcttgtgtcggtctgtcagtttcgcatggtcgagaatgtcttttacaacctgcgtctggttgatttcatcaagtttaatcgcaacctttaaggtcggggcaacttgatgagatagccagttcagcgtcctttggaaggagtaaggctctggttttgtggttagttttaatcgttcacgattgttcccaataaaccaagcccattcttcattcagtttccaatcagaacgaggtttggaatcgtctttatctacaaaacggatataccgattgataattttaaaggcggtatgctctggattgtcatagacgagtaaatcacggactgcataataggcacgctcatttttcaatcgaatctcaaaacggttttttacttctgcgtcttcaatgggaatatcatttttcttgtactgctcgtagtccttttcatagatacagaaataaacttcactttgtaatgaaccgatatagagggtgtttcccatacattccttttcctctttgcgtaccagttcgccactgcgatagcttttaaaactgcggaagacggagatacattcttcctgttggcacttttcagtgagtacagggatatttaaaatccctgtcttatcgttaatggcaaggtcaaggcgtttcatcacaccgccagccaccaaaacgtccataaagaactcataccagcttctttgttgtgccagaagatagctttcaaattgtctgcacccacgacctttcaattccaccagaactcctttgtccagttcatgggagcaaaggacgaatatgtcgcctaaagcataatgctctgaataagaatagaaaccatagtcctcatgaagaaaataggacagtttcagttgtaagatgttttcgaccacctgctgtacgtctgttgtcggaaagcgaattcttacataatcaaacagcatttcaaggggagcgtcgggattgaagcgttccagagcttcccaaagggactgctgtaaatcctctgatggcttgacttttcctgtttcaatatcgcttagatactgccttgtaataccagtcgcaacagctaaacggttttgagatagtccataagccaagcgtttttcttttaaatgctgtaaccaagtttgttcattcagtaaaaatccctccaatcaaaaaggcgtatgtcaacttttaaagcccatttgacatacgctgaaattttgtaaatcccttgtaaccaaaggattttctaatgtttttttgactgtttcctgtcgatttgtacccccctgttagatacggggggttaagtgctggcgtggctattgccacaccagccagcaagatcagtccacacctgcgacttccgcttcgcacgtcgcctgcgtggactgtctgctgttggataactttttaatttcctccaagaaatcatatccttttggtacaaggggagtataaaactctgatatgacacttgttcctacatcaacatagccacgacctttgattcgctttaagaagaaatccttttgtacgtcactgccaaacatcatgccatagcccatttcagacatacgacctaaagccactctgaaattaaactgatcacggattccgtcgcctaaatattttgcgtctggacgttgacaagccagtattagaaagaagccagcttgacgacctaacatgacaatctgtttcagcttattcataactgcggtgttttcttttgttcccagcatttccatgaaagcgacgtattcatcaaagattaagaagtgtgccgggagacctaagtaagcataatttttgccagtcttatagttcttcatctgcttcatttcctcactacgtttcatcatttcttcatagaatgtttcaatgcaagaaagcaagtcttcttttctatagtagacatttgccatcacagaacctaagtccgcaagatcagcatttttcgggtcaagaatatacagttttgaatctgtatgaagcaaggcttcaatcagtgtcagtataaagtaagttttaccgccacctgtaccaccagcaatcaacatatgagggagcttatcatattcccaccatacgtttttcattaagcgaagtttaccatctttagcttctacttcatcaatagaaatacgactggctatggtgtcatagagcaaagtatattccacataggaatcctttaactctttatccgtcagctcacagtacaagccactctctaatttcttttccaagtgtaagagttggtcttgatattttcccagcgtgatttccacccgtatctgtatcaagccatttttaagtcgataatacattttagggaagtaggttatcttttcctttgtacgaccagcactatctttaaagaaaccctctgttttgacctgttcagattcataccacttgttttcaagtatcatctttgccagtttttgacggtggtaaagttgtttaaccgtatcatagcgaacccgtttgaatacaaacgctaccagcaagcagataagaattgcgacactgaaactgataattaaatagggaatgtcaatcttatctgcttgtgataggttaaaatcctgccagttgatctgctggattgtcttcacatgaaacagtccgacaaccagcaggaaaacaggcaggagtgacgctatcgtaaaatgaaagactaaatctttaccagatgggcgaatccttttaccacgctgtttcatgcgaaaaagtctcctttctacctagcgactatttgtcttgtgtcggttctttctttgcttgtggttgagctttgaatgaactagaatcctttgtcagcacaatatcgtctgccttgatataccagtcaacatctgctccttgataggtggcagtagcaacggtgtccgcaatgggattgataagttccacccgtgcgttataatcaaactctttcaaaggcacgctggcaggaatacttacttgaatcatgcgtccttgtcctttggattttaagtcataggtacgttccttgatttcatctgaaaccgacccgtcttcattttggattctcacttcacgacgtagagcagagaatttcaattctccaaaagtcgtgtctttatctaatacaatgccatttgctaatctcatcatttttcctctctttctttattcttttatcatgtcgtcagcatgtaaaaggtaatttgtaaaaccacgagtgccgattttgtagccctctgcggtaatacgtggattgactaacttcacacgttcctcaaagccgaaatgtttttcgccagcttcagcaggaagcaccaccacaatatcatctgctctttgaacatcagaatagagattatagcttcttgataagacagttagccgtccgttgattcttcgctgaacgactttatcctcgccagcaaattctaaattgccgaatgttttttccatgttgggaatcacaaatttaagttccatatttttacctatcctttcttttttattggctgaatgaatgtttgatggtcttaaagagtggggaacgaccttttgattcttgattttttgttttcataagttcacttcctttcaaaatcgggtaaaaaaatagacacctcattttttgaagtgtctacctattaaatattcaaattttattggaagtatctttatatcttcacttttcaaggataaatcgtcgtatcaaagctcattcataagtagtaaattagtagtaaattgagtggttttgaccttgataaagtgtgataagtccagtttttatgcggataactagatttttatgctatttttaaacataaaaaatggactgggacattaagttcttaggcaatgtaaaaaagctgatttctattaattatttgatagaaatcagctttttttaaatgtatttgataatgtacagctcgttgagctgctattttccttatattaagtgccattaatacaaaacctagctctcgtttaactttatttattcctcgaactgacattcgagtgaaacccaaaatagccttcataaatccaaaaacaggctctacatcaatttttctttgactatagatttttttcgtttttggttcagaaagcttttgattaatttgggctttaaagtaatcccaattataattcttcatgattttcttattggatttcgaatttggctttatgcattgttgcctcaaagaacatgctgaacagtcatcgcattcatatagtttgaagtcacgtttaaaaccatatctatcattacggtatgcatatcttttaaaacctattcttttgttattaggacatataaattcatcattaagttcgtcatatttccaattttgagtgttgaaaatgtcacttttaaactttctagttttatcttaaataaacatgccatatgtaataagtggcgttttattaaaatcatctataatagccatatagttttgctcactaccataacctccatcaactacaatatactctggtaaataacgaaggtattttgaatcattgttaaaaatggaattaatgttctagtatctgttgggttttgaaataggtcataggataaaacaaattgagaatttgtcgctatttgtaaattgtatcctggcttaagttgggtcacgttataatttttatacataaggcacctcgttaatttagtttagtggtatttattaaattatacgacgggacccaacacagaaaattcattttattgaattttacatttatgtgcaagttgggcaaagtgtcttattttttaagtatttcaaagtaaaattacatgttaatacgtagtattaatggcgagactcctgagggagcagtgccagtcgaagaccgaggctgagacggcaccctaggaaagcgaagccattcaatacgaagtattgtataaatagagaacagcagtaagatattttctaattgaaaatatcttactgctgtttattagggatttatgtcccagtccaacaaaattctaacctagataattaagattagattgaatcgcatgattcatttatttagctttgtaaccaatcatattgattaaatctttagggtggctatatggtggtgcataagccacttcaaactcagttaactcatctacagttagctggttcatcattgccatcgatagtacatcaatacgtttatctgcaccttcttttcctactgcagctgctcttaaaatctgatggtttgaagtgtcataatatactcttaagtgtaaaggggaatttcctgggtaataattcgcgtgtgcaccttgagtgacttctaccattttatagtcaaattgctttagttcgtttggtttaacgccgacactcgcaaatgtataatcaaagaacttcacaatattgttgcctaagaagcctttgaattcaatagtgtcatttccagcaatttgttcggcaacaatacttgctgcacggtgagcgccccaagctaaaggaacactagccggtagatcgacatgtcgataatgtgatgttgcaatatcgcctattgcataaatgtttggaacatttgtttcaaatttatcgtttaccggtatgaaaccttttcgatcaattttgatatttgaactttcgataaattttgaattggggtgagtaccgacaccttcaataatcatatcgtaatgttcaacttttcctgatttaaatgtaatttcatttccattgatagtatcaatttcctcatttaaacggtatggaatctcccgcttatctaattcatcaagtataggttgattcatgtcggcatccattaatttatttatcttatcagatcgatgaattaaagtagggtgtaaaccacgttcataaaggttttcaagaacttctaatgaaacataccctgcacctacaaccaatactttatcaacttgatttgctttgatgaattgatcgatagcatcagtgtcttctaaatttctaagtgtaaatgtaatatcactttcaaagccaaggctatttgcacttgcaccagggcttaaaatgagtttatcgtatgattcttcaaattgttcgttggtctttctatttaatacagttacagtttgtctttcatcattgattgcaataacttcatgataagtttttactgtaatttgctttctatcataaaatttttcaggtgtatatgctaaagcatattttctatcttcaacaacttcgccaatgacataaggcaatgcacaattagcaaagctcatatcacgatctttttcaaaaataataatgtcactttctttatctaaacgtcgaatttggctggcacatgtagcaccgccagcgactgctccgactacgactattttgggcatcgtaacttacctcctattgttttaaaatattataaaatgattagttataaattaacagtaatatctaatatttaaattaaagaaatcattcaaatatcgaccaatgccatcttcattattgttgaatgtaatattgttcgctacatctttaagttcttgcaaaccattttccatagcaacaccgtgacgtgcgtactcaatcatttctatatcattatcttcatcaccgaatgcaataatattatttcggtcaatatttaaaaattgtctaacttgttcaatacctctagctttattaattccaagttttacaatttcaatgacagggaatggtgcgccccaacgtcgatgctcaatatgatcggcataaaaatgagtaagcatatttttgatttcaggtattttactttcttcggcttcaattaaaattgaggtaggggattctttcaagtggacaagtaaattaccagtttgaattcttggattacccattgaaaaaccttcaaataaccttggatcatgattgttaatgaaaacataatctttcacttctgcaataatattcgatacttgatattgttgtaatccttgaataatattttgtgcgatgcctaaatctaaaatttcatggcaagttttgaagtttttatctttagggtgatgtacgtaagcgccattaaaattaacaattggtgtcgttaaatttaattcatgataatacatttgacttgcacgataaggtctgccagtcgcaatcataatttggtgtccacgttgttgtaattcatttaatacttgtttagtatatgatgaaatttctttgttatcgtttaataatgttccgtctaagtctagacatattaaatgtggttgcatatctctctcctcataagttgcatagttcatatagatacatcatagcattttattggcgttttgtcggatatttgatatattatgaataatatgacattaaagaggtgatatggatggaagaggcattgaaagatagtatcttaggtgcattagaaatggtaattgaccctgaattaggaattgatatcgttaatttaggtttagtatacaaagtgaatgttgatgatgaaggcgtatgtacagttgatatgactttaacatcaatgggatgtccaatgggacctcaaattattgatcaagttaaaacagtattagcagagattcctgaaattcaggatactgaagtgaatatcgtatggagtccgccttggacaaaagatatgatgtcacgttacgctaagattgcacttggtgtgagctaacataaacgtgcattgcctgtagaaattggaaatccaattggggctccgcttccaacttgcattgcttgtagaatttcttttcgaaattctctgtgttggggccccgcagtcaatataaccttgtagagtataattcattgtgaataagctcccttcaaagtagacattgaaaaatgaaaattttgaagggagccttatttatgttctatgttctgattttattttgaaaatttatatctaacttgtttcaaaaaaatatgaactaagacagtgactcgtacttctgagagtgcacaattaattttctagttgaatattttcttggaaattttaataataaattgaatttatattacggttatattacaatacataatacttcatagtttttaagttgccgagttgcattacaaattggatttcgaaataagaatcatcattggtaatttttttaatataacagtattttagtcaatatgattttgatgatgtcgtaattcaataatatacatatgcatttcaatattcttttaaacagcataactaaatttaattaagcatctaagaagaacagttttaaaagggaagaatgcaaaaatgaacaaaacaaagggttttacaaaatataagaaaatgagatatatgccagggctcgatggtttgagggcaatcgctgttctaggaattattatttaccacttaaataagcaatggttgacaggtggctttttaggtgtggatacattttttgtgatctctggttatttaattacaagcttattactcaaagagtatgatgacacaggtatcattaaattgaaaagcttttggatacgtcgtttaaaacgtttattaccagcagtcatagttttattaatggttgtaggaacagcaaccttattattaaaatcagataatatcattagggttaaacatgatattattgctgcgatattttatgtatcaaactggtggtatatagcaaaagatgttaattattttgagcaattttcatttatgccattaaagcatttatggtctctagcaattgaagaacagttttacatatttttcccagttattttggttacattattgttaacaattaaaaagcgatacaaaataggatttattttttggggagtatcaatgatttctttagggttaatgatgtttatctacagtattaatggggatcattcacgagtgtattttggtacagatactagattacagacattgttactgggtgttattttagcttttttatggccaccgtttaaattgaaaaatgatccacctaaagttgtaaaatatgttattgatagcataggtagtttatcatttatagtacttatattattatttttcattattaatgatgagacgaattggatatatgatggtggtttctatttaatatccatattaacattatttattattgccagtgtcgttcatccatctacatggatagcgaagatattttcaaatccagtgttagtatttatcgggaaaaggtcttatagtctatatttatggcattttgcagtaattagtttcgtacatagttactatgtagacggacagatacctgtatatgtgtactttatagatataagtttaacaattatatttgcagagctatcatatcgctttatagaaactccatttagaaaagaaggtattaaagctttaaattggcgaccttcttatataccacaatttataagaatggcaattgtagtaaccttgttaattccatttatgttgattttagtaggtgcattcaataaatatggtaaagacattataggagaaaaagcgaatagctttgataccactattgaagataattatttaatgcggatagcaccaattgataacattcacattgatggcttagtaagtgagaagaaaaaggaatcttccgacgtatataataatattaaacctcttttaatcggtgattcagtaatggttgatatcggtgagtcatttaagtcatcagttcctaagtctagaattgatggaaaagtagggcgtcaattgtatcaaaccttacctttagttaaagcgaattattcacaatataaaaaatcatctgatcaagtcgtattagaattaggtacaaatggcgactttactgtcaaacagctcgacgatttacttaatcaatttggaaaagccaagatttatttagttaatacacgtgttccaagaatttatgaggcaaatgtaaatcgattattagctgacgcggcgaaacgaaagtccaatgtcacattaattgattggtataaacgatcacaaggacatagtgaatattttgcaccagacggtgtacatttagagtacaaaggagtcctagctttaaaagatgaaatattaaaagcacttaaaaagaaataacatatgtttaataagtctagttaatgtgtaacgtaacattagctagatttttttaattcaaaaaattatttacaaatattaggaaatttaagtgtaaaagagttgataaatgattatattgggactataatataattaaggtcaaagaaagtcaaagtcaaaagtgcaacttgaccaactctacaaattagaggtgaaattaatggatataaataaaatgacatatgctgttcaaagtgctttacaacaagcagttgaactgagtcagcaacataaattacaaaatatagaaattgaggcaattttaagcgctgccttaaatgaaagtgaaagcttatataaaagtattttagaacgagcaaatattgaggtagatcaattaaacaaagcttatgaagacaaactaaacacgtatgcatctgtagaaggtgacaatatacaatatggtcaatatattagccaacaagcaaaccaattgataactaaggctgaatcatacatgaaagaatatgaagatgaatatatttcaatggagcatattttacgttcggcaatggacattgatcaaacaacaaaacattatataaataataaagtagaagttatcaaagaaattattaaaaaagtaagagggggaaatcacgtgacatcacaaaatcctgaagttaattacgaagcattagctaaatatggccgcgacttagtagaagaagttagacaaggtaaaatggatcctgttataggaagagatgaagaaattcgaaatacgattcgtattttaagtcgtaaaactaaaaacaaccctgtgctcattggtgaaccaggtgttggtaaaactgcaattgttgaaggattagcgcaacgtatagttaagaaagatgtgccagaatcattattagataaaactgtttttgagttagatttaagcgcattagtagcgggcgctaaatatcgtggtgaatttgaagagagattaaaagcagtcctaaaagaagttaaagagtctgatggtagaattatattatttattgatgaaatccatatgcttgtaggtgctggtaaaacagatggtgccatggatgcaggcaacatgctaaaaccaatgttagcacgaggagagttacattgtattggtgcaacaactttaaatgaatatcgagaatatattgaaaaagattcggcattagagcgtcgtttccaaaaagtagcagttagtgagcctgatgttgaagatacaatttcaattttacgtggtttaaaagaacgatatgaagtgtatcatggtgtgcgtattcaagatagagccttagttgctgccgctgaattgtctgatcgttacatcactgatcgttttttaccagataaagcgattgatttagttgaccaagcatgtgcaacaattcgtacggaaatgggatcaaatccaactgaattggatcaagttaatagacgtgtcatgcaattagaaattgaagaaagcgcacttaaaaatgaatctgacaatgcgagcaaacagagattacaagaactacaagaagagcttgccaatgaaaaagagaaacaagcagcacttcaatctcgtgtagaatcagaaaaagaaaaaatagcaaagttacaagaaaaacgtgcgcaattagatgaaaatagacaagcgttggaagatgcacaaacaaataacaatttagaaaaagctgctgaactacaatatggaacaattcctcaattggaaaaagaacttagagaattagaggataatttccaagatgagcaaggtgaagatacagatcgaatgattcgtgaagttgtaacagacgaagaaattggcgatattgtcagccaatggacaggcataccagtttcaaaattagttgaaacagaacgtgaaaaattacttcacttaagtgatatcttgcataaacgtgttgtaggtcaagataaagcggttgacctggtttcagatgcagtagttagagctagagcaggtattaaagatccaaacagacctattggtagtttcttattcctaggtccaactggggtaggtaaaactgaattagctaaatcattagctgcatcattatttgattctgaaaaacatatgattcgtattgatatgagtgaatatatggaaaaacatgcagtatcaagattgattggggcacctccaggatatattggacatgatgaagggggtcaattaactgaagcggttcgtcgtaatccatactcagttattttattagatgaggttgaaaaagcgcatactgacgtctttaatgtattattgcaaattttagatgaaggccgtttaactgattctaaaggacgtagcgttgattttaaaaatactattattattatgacaagtaatattggatctcaagttttactagaaaacgtaaaagagactggtgaaattacagaatcaacagaaaaagctgttatgacaagtttaaatgcatatttcaaaccagaaattttgaatcgtatggatgacatcgtattatttaaacctttatctattgatgacatgagtatgattgtagacaaaatattaacgcaattaaatataagattactagaacaacgaatctcaattgaagtttctgatgatgctaaagcttggctaggtcaagaggcttatgaacctcaatacggtgcaagaccattaaaacgttttgtacaacgccaaattgaaacaccattagcacgtatgatgattaaagagggattcccagaaggtacaactattaaagttaatttaaattcagacaataacttaacgtttaatgttgaaaaaattcatgaataaaattgaaccaagaatgtgatgattaatcgcattcttggttttttagatttgaaatttattataattgttcattggcaatatactttttaaatgatttaataaacgccaatatttctggattttcttttttgctgtatatatatgtaaatgaaataggtgcttgtaaaattttcgtgttaataaccgaaatattgtaattactattttttgttatataaataggcaggaatgatataccttgattcatttcgattaatttaattgaagtatgcacatcattgatagatagaaattgtgctttttcataaatatttaaaatattatttttaagtgatgaccaatattctggatggttatcacttattattttgtatttttcaaataaagatgcctcagttagaagatgattattctctttattgggagcaatcaatacaattttaccttcgcatactttttcagaatgaacttctcttagtttaggttgatttctgctaatcccgatgtcatacgtatgattattaatatctttttcaatattttcatttttgacatgaagagaaacatcgataaaaggatgctcgttaaagaatgattttaaaaatttgggcataatgaatgtcgcgatatatgaagacacgacaacatttaatttcgattgaaacatcgtttttttaagttggatatgtttgatgccactttcatattgttcaataaaactttgcgcaattggaagaaatgtatgaccatcttcagtcaagataatttgatttttataagtttcaaatagtttcacattgagatgttgttctaaatttttaatttgcttatgtatagaaggtatagtgagattaatttcttcactagctaatcgatagtttaacgtcttcgctaaaatgacaaatgtatagtaccaatccaaattcatgaacttacctctttcaaaaaagttaatgattcattagataatatttaatttttattgcataaaaataatattaatattatatcagaggttaaggctgaatgaataaaagattttacaaggagagagcaacatgaaaattaacactgaatttaaagggaacaatataccatatgaatacgcagcaggtgcagatgtgagtgattctattaacgggaatccaattaaatcatttccatttgaagtaactgaattaccggaagggactaaatatcttgcttggtctttaattgactatgatgcaatcccagtatgtggctttgcttggattcattggagtgtagctaatgtaagtgttagtggcaattcaatttctattaaagcagatttatcaagaacaaagggcgactatgtacaaggtaaaaatagcttcactagtggtttgttagctgatgatttttcagaaatagaaaatcactatgtaggaccaacaccacctgataaagatcatcaatatgaattaactgtttatgcgttagatcattctttaaatttgaagaatgggttctacttgaatgaatttttaaaagaagtaaatcaacataaaatagatcaaacaagtattaaccttataggaagaaaaatttaatactaaatatctcatcaatataaaattgttcaattaaaagtacgaagaaacaagggatttaatttatatattaggtacggcgttcgctataatgcaatgaagtaattaaatttaagaaatgtaaacttagttattgtaatgtgaatttatttgaaaaaatagaaagtattaacaattatagcttttacattaattaaaatttatttttaaaaacaagtaaacaatttacatacttataatttttgaaacttttagatttgtgttatattgattttgtaagatactttaactcacaaaggagagagattatatgaaattaaaatcatttataactgtaactttggcactgggcatgatcgcaacgactggcgctactgtggtaagtaatgaggtatctgcagcagaaaaggacaaactaccggcaactcaaaaagctaaagaaatgcaaaatgttccatatacaattgcagtagatggcattatggctttcaatcaatcttacttaaatttacctaaagatagccaattatcatatttagatttaggaaataaagttaaagctttattatatgatgaacgtggtgtaacacctgagaagattcgaaatgcaaaatcagccgtttacacgattacttggaaagatggcagcaaaaaagaagtggatttaaagaaagatagttatacagcaaacttgtttgattcaaattcaattaaacaaattaatattaatgtaaaaactaaataaacacttaaaattatcaaattcaacatgaagcatttaattttacagtgatgattataatataattgccttgatacaaagattactcgtaaatgacatctttgtattaaggctttttctatatttaaaagtgatgggatagaggtcattgagttttaaaatattcaaaatacaaaacattaatggccaaaaataaaagccgcctttatctgggcagcttcaataataagaaagacatatttcattttatactaaatagttattgtgatgaatctttcggcggtttaattactgcagcaaaaattgctgtgaaaatcgtgaacaatactgccatgataattggattcactacatttaagctgtctccacctactaggctattaagtacaaagttaaccatttgcattaataataatgcccaaaagaatgttacgaggtgtttcatgtcattctacctccactttaattatatatattttattttaagtgaaagttagaaatttgtatagtaacatctcatatattttgaccatattatacagtttaaataaatgattttatctgaatggctattctaatttaagcccattaaaaccaatttcatactgaaatttgacgataataaagctttaaaattttattaactagtcaatattcctatctctgacttgagtttaaaaagtaatctatgttaaattaatacctggtattaaaaattttattaagaaggtgttcaactatgaacgtgggtattaaaggttttggtgcatatgcgccagaaaagattattgacaatgcctattttgagcaatttttagatacatctgatgaatggatttctaagatgactggaattaaagaaagacattgggcagatgacgatcaagatacttcagatttagcatatgaagcaagtgtaaaagcaatcgctgacgctggtattcagcccgaagatatagatatgataattgttgccacagcaactggagatatgccatttccaactgtcgcaaatatgttgcaagaacgtttagggacgggcaaagttgcctctatggatcaacttgcagcatgttctggatttatgtattcaatgattacagctaaacaatatgttcaatctggagattatcataatattttagttgtcggtgcagataaattatctaaaataacagatttaactgaccgttctactgcagttctatttggagatggtgcaggtgcggttatcatcggtgaagtttcagaaggtagaggtattataagttatgaaatgggttctgatggcactggtggcaaacatttatatttagataaagatactggtaaactgaaaatgaatggtcgagaagtatttaaatttgctgttagaattatgggtgatgcatcaacacgtgtagttgaaaaagcgaatttaacatcagatgatatagatttatttattcctcatcaagctaatattagaattatggaatcagctagagaacgcttaggtatttcaaaagacaaaatgagtgtttctgtaaataaatatggaaatacttcagctgcgtcaatacctttaagtatcgatcaagaattaaaaaatggtaaactcaaagatgatgatacaattgttcttgtcggattcggtggcggcctaacttggggcgcaatgacaataaaatggggaaaataggaggataacgaatgagtcaaaataaaagagtagttattacaggtatgggagccctttctccaatcggtaatgatgtcaaaacaacatgggagaatgctctaaaaggcgtaaatggtatcgataaaattacacgtatcgatactgaaccttatagcgttcacttagcaggagaacttaaaaactttaatattgaagatcatatcgacaaaaaagaagcgcgtcgtatggatagatttactcaatatgcaattgtagcagctagagaggctgttaaagatgcgcaattagatatcaatgaaaatactgcagatcgaatcggtgtatggattggttctggtatcggtggtatggaaacatttgaaattgcacataaacaattaatggataaaggcccaagacgtgtgagtccatttttcgtaccaatgttaattcctgatatggcaactggccaagtatcaattgacttaggtgcaaaaggaccaaatggtgcaacagttacagcatgtgcaacaggtacaaactcaatcggagaagcatttaaaattgtgcaacgcggtgatgcagatgcaatgattactggtggtacggaagctccaattactcatatggcaattgcaggtttcagtgcaagtcgagcgctttctacaaatgatgacattgaaacagcatgtcgtccattccaagaaggtagagacggttttgttatgggtgaaggtgctggtattttagtaatcgaatctttagattcagcacaagctcgaggtgccaatatttatgctgagatagttggctatggtactacaggtgatgcttatcatattacagcgccagctccagaaggtgaaggcggttctagagcaatgcaagcagctatggatgatgctggtattgaacctaaagatgtacaatacttaaatgcccatggtacaagtactcctgttggtgacttaaatgaagttaaagctattaaaaatacatttggtgaagcagctaaacacttaaaagttagctcaacaaaatcaatgactggtcacttacttggtgcaacaggtggaattgaagcaatcttctcagcgctttcaattaaagactctaaagtcgcaccgacaattcatgcggtaacaccagacccagaatgtgatttggatattgttccaaatgaagcgcaaaaccttgatattacttatgcaatgagtaacagcttaggattcggtggacataacgcagtattagtattcaagaaatttgaagcataattataaaaatcttcagtaacgttgttttagtttctgaagattttttcagtttctttatactaagatgagcgacagcacaatcgtcataataaaatataaaatatttattaataataatggtattatccatttagaaacaaagtaatgctctttttttacctcttgtgggttgaaaaatggatcatcagagatagacttcttctttttcgaagatgacatttgatactttaatcttctaaaaccataacttgtcgcatcaaaaatgccttcttgtacaagtaaaatcaaaaaaatgctaataaaaataattaatgaaacataaaacaatatatttaaatatgtaatgatagtatggctattaaaaacccatataataaacgttaacattggggttattagtgccattccaagccattttttcaacatttgatcactcccacttatagaaaactcttacgcatagtttacattaaaatgagacattgaggaatgattttttaatttcttcacctttattgaaattctaaaatcaatcattcttcattaatttaaagcaaaaaaatattgatatatagtaaatattgtatatataatattagttaagatttcagaaaattttgaagggaatggaaatttagaaatcggaatttgttagaggaggggattagatggggaaatatatttttaaacgatttatttatatgcttatttctttatttattattattacaattacatttttcttaatgaaattaatgccaggttcgccatttaacgatgctaaattaaatgctgaacaaaaagaaattttaaatgaaaaatatggattaaatgatcctgtagctacgcagtatttacattatttaaaaaatgttgttacaggcgattttggtaattcattccagtatcataatcaacctgtgtgggatttgattaaaccgagactactaccttcttttgaaatgggtcttacagcaatgttcatcggtatgatactgggacttattttaggtgttgcagcagctactaaacaaaattcttgggttgactatacaactacagttatttcagttattgcagtatctgtaccatcttttgtacttgctgtacttttacaatatgtatttgcagttaaattgagatggttcccagtagctggatgggaaggtttttcgaccgcggtattaccgtcacttgcattatctgcagctgttttagcaactgtcgccagatacataagagcagagatgatagaggtattaagttcagactacattttattagcgagagctaaaggtaattcgacaatgcgtgtactttttggacatgcacttagaaatgctttaattccaattattacaattatcgttcccatgttagcaagtattttaacaggcactttaacaattgaaaatatttttggagttcctggattaggggatcaattcgtacgttcaattacaacaaatgatttctcagtaatcatggcaatcacactattatttagcacactgtttatcgtttctatttttattgtagatattttgtacggtgtgatagatccacgaattcgtgttcaaggaggtaaaaaataatggctgaaaataaaaacaatttgtcgattaacgacgatcattctaatgcagctatgacgcatacctctgacgctatcgcatcatctgattttattattagagaattagatttgaatcaggaacctgaaatgcaacgagaaagcaaaaacttttggcaagatgcttgggctcagttaaaacgaaataagttagctgttgtcggtatgataggtttaattatcattgtaatatttgcttttatcggtccagttataaataaacatgattatgctgaacaaaatgtacaacatagaaatcttccagcaaaaatacctttattagacaaagttccatttttaccttttgatggtaaagatgcagatggcaaggatgcttataaagcagcaaatgctaaagaaaattattggtttggtactgatcagttgggtcgagatttatggacaagaacatggaaaggtgctcaaatttcattgtttatcggtgttgttgcagcgatgttagatatttttattggcgttgtatatggtgcgatttctggattcttcggtggacgtgtcgatacgattatgcaacgtatacttgaagtcatagcatctattccgaatttaattgtcgtaattttatttgtattaatttttgaaccatccatttggacaattatattggctatgtctatcacaggctggttaggcatgagcagagttgtacgtggagaatttttaaaattgaaaaatcaagagtttgtcatggcttcgaaaacattgggggcttcaaaattcaaattgatatttaagcatattttacctaatacgttaggtgctatcgtggttacatcaatgtttacagtacctagtgctattttcttcgaagcatttttaagtttcattggtataggtgtacccgcacctcaaacatcgttagggtcattagtaaatgatgggcgtgcaatgttattaatttatccacatgaattatttataccagcaatgattttaagtttattaattctattcttttacttatttagtgatggattacgtgatgcatttgatccgaaaatgcgtaaataaaagggggcatagcatatgactgaaagaatattagaagtaaatgatttgcatgtttcctttgatattacagcaggggaagtgcaggcagtgagaggtgtagatttttatttaaacaaaggggaaacattggcaattgttggtgaatcaggttcaggtaaatctgtaacaacaaaagcaattacaaaattattccaaggggacactggaagaattaaaaagggagaaattttatttttaggggaagatttagcaaaaaaacctgaaaatgagttaattaaattacgtggcaaagatatttcaatgatctttcaagatccaatgacatctttaaacccaacgatgcaaattggtaaacaagtcatggaaccattaattaaacacaaaaattatagtaaagcacaagctaaaaagcgcgcattggaaatactaaatcttgtaggtttaccaaatgcagaaaaaagatttaaagcatatccacatcaattttcaggtggacaaaggcaaagaattgttattgcaaccgcattagcttgtgaacctaaagtgctcattgctgatgaaccaacgactgcattagacgtaacgatgcaggcacaaattttagatttaatgaaagaactacaacaaaaaatcgatacagcaattatttttataacgcatgatttaggggttgttgcgaatattgctgatagagtggcagttatgtatggtggtcaaatggtagaaacaggagatgttaacgaaatattttatgatccaaagcatccatatacatggggattattatcgtcaatgcctgatctatcaacaacaaatgacacaccattactagcgattcctggagcgccacctgatttattacacccacctaaaggtgatgcatttgcgagacgtagtcaatatgcattagatattgattttaaagtagaaccgccgtggtttaaagtttcaccgacacattttgtgaaatcttggttattagacgcacgtgcaccaaaagttgaactacccgagctggtaaaacaacgtatgaaaccgatgcctaataattatgaaaaaccactcaaggtagaaagggtgtcgttcaatgaaaaatgatgaagtgctattatctattaaaaatttaaagcaatattttaacgcaggaaagaaaaacgaagtgagagcgattgaaaatatttcgtttgaaatatacaaaggggaaacattaggtttagtaggagaatcggggtgtggtaaatctacaactggtaaatcaattatcaaacttaatgatattacaagtggagaaattttgtatgagggtattgatatacaaaagattcgtaaacgtaaagatttgcttaaatttaataaaaagatacagatgatttttcaagacccatatgcgtctttaaatcctaggttaaaagtaatggatatagtagctgaaggtattgatatccatcatttagcaactgataaacgtgaccgtaaaaaacgtgtctatgatttacttgaaactgttggattaagtaaagaacatgccaatcgttatcctcatgaattttcaggtggacaacgccaacgtattggaattgcccgtgcactagccgttgaaccagaatttattatagcagatgaacctatttcagcattggatgtttcaattcaagctcaagtagtcaatttgttattaaaattacagcgtgaaaaaggtattacattcctatttattgcacatgatttatcaatggtgaagtatatctctgatcgaattgcagtcatgcattttgggaaaattgtagaaatcggaccagcagacgatatttatcaatatccattacatgattatactaagtctttattgtcggcaattcctcaaccggatcctgaatcggaacgtagtcgcaaacgatttagttatattgatgatgaagcaaataatcatttaagacaattacatgaaattagaccgaatcactttgtctttagtactgaagatgaagcggcacgactacgaaaaaatttgttggtgatacaagattaagaggaagggggaaatgaaatgacaagaaagttaaaagcgctgattttaatattggttgctacaattgcattaagtggttgtgctaatgatgatggtatttattcagataaaggtcaagtattcagaaaaattttatcatcagacttaacatcccttgatacatcattaataacggatgaaatatcttctgaagtgactgcgcaaacattcgaaggtttatacacattaggaaaaggtgacaaaccggtgttaggtgttgcgaaagcttttcctgaaaagagtaaagatggtaaaactttaaaggttaaattaagaagcgatgctaaatggagcaatggtgacaaagtgactgcacaagactttgtttatgcttggagaaaaacagttgaccctaaaacaggttctgaatttgcatacattatgggggacattaaaaatgcgagtgatattagtactggtaagaaacctgtagagcaattaggtatcaaagcattagatgatgaaacattacaaattgatttagaaaagccggtaccatacattaatcaattattagcacttaatacatttgcacctcaaaatgaaaaagttgccaaaaaatatggtaaaaattatggtacggcagctgatagagcggtatacaatggtccatttaaagttgatgattggaaacaagaagataaaacgttactatctaaaaatcagtattattgggataaaaagaaagtaaaattagataaagtgaattataaagttattaaagacttacaagcaggtgcatcattgtatgatactgaatcagtagatgacgcagttattacagcagatcaagtaaataaatataaagataataaaggattaaactttgtgttaacgactgggacattttttgtaaaaatgaatgaaaaacaatatcctgattttaaaaacaaaaatttaagactggctatcgcacaagcaatagataaaaaaggatacgttgattcagtgaaaaacaatggttcaattccttccgatacactaacagccaaaggcattgcgaaagcacctaatggcaaagattatgcgagtaccatgaattcacctctaaaatataatcctaaagaagcaagagcgcactgggacaaagctaaaaaagagttaggtaaaaatgaattgtcattttcgatgaacacagaagatacaccagatgcaaaaatatctgctgaatacatcaaatcacaagttgagaaaaatttaccaggtgtcactttgaaaattaagcaattaccgtttaaacaaagagtatcactagaactgagtaacaattttgaagcatcacttagtggttggtctgcagattaccctgatcctatggcttacttagaaacaatgaccacaggtagcgcacaaaataatacagactggggtaataaagaatacgatcaattacttaaagtagcgagaaccaaattggcacttcaaccgaacgaacgatatgaaaacttgaaaaaagcagaagaaatgttcctaggagatgcaccggtagcaccaatttatcaaaaaggtgttgcacatttaacaaatcctcaagtaaaaggattaatttaccataaatttggtccaaataactcacttaaacatgtatatattgataaatcgatagataaagaaacaggtaagaagaaaaaataatatgctttgtaaattcaggctggagacatatctccagtctttttgtgttgcagaaaaactttgggaataaaaaatgggaaacaataaaaaaatgttgaaaataaataaaatagctatataatagtgttaatattctgaaaatttagttagatggagtgtatagattgcgatgattaaatattttttgaagagaattttttatatggcaatttcattagtaattattacaacaataactttttttctaatgaaattaatgcctggttcaccttttaatgatgctaaattaagtccggatcaaaaatatattttaaatgagaaatatggtttaaatgaccctataccaatacaatatttaaattacatgaaaaatgtatttacaggggattttggttattcttttcagtatcataatcaaccagtgtgggacattatcaaaccaaggttaatcccttctctggaaatgggcattacagcaatgataataggagtgttgattggattaattttaggagttgcttctgctgcaaaacaaaatacttggatagattattgtgcaacacttatatcagtattagcagtgtctgttccttctttcgtacttgcagttttattacaatttgtatttgcagttaaattgagatggtttcctgtagctggttgggaaggcatttcaacagttatactgccttcatttgcgctatctgctattgttattgcgacagtcactagatatattcgtgccgaacttttagaggtgttaaaaagtgattatatactgttggctagggcaaaaggtgttcctaataaaagggttttatatacacacgctttaagaaatgctcttatcccacttgtaacagtgctagtaccaatgatggctagtatattaactggtacattaactattgaaaatacttttggagtaccagggttaggagatcaatttgtacgttctattgccacaaatgatttcccagtaataatggctacaactattttatttagtagtttttttatagtgtcaatatttttagtagatatgttatacataattattgatccaagaatacgcatccaaggaggaagaaataatggtgattgatgaaaataaaaagcaattgacttcaacggattttgaatttaaaaaagataaaataaatcaagaatttttaaacgttaaaaataagaatttttggcaagatggctggtcacaattaagaaaaaataaattagctgttataggtatgattggattaataatgattattttatttgctttatttgcacccgcagtttctcagcataatagtactgagcagaatgtcacagatagaaatttaccttcgaaaatacctctgttagaaaaagttgattatttgccttttaatggcaaagatgttaacggcaaagatacttataaagaggtaggttcaaaagattattacttatttggaaccgatcagttgggtcgagatttatggtcgagaacatgggaaggtgcacgaatatcattatttattggtgtggttgctgctattttagatatatttattggagttttatttggtgctatatctggtttttatggtggcaaattagatactatcatgcaaagaattatagaaattatagcttcgattcctaatttaataatagtaattttattcgtattaatctttgagccatcaatatggacaattattttagctatgtcagtgactggatggatttcaatgagtagagtagtaagaggagaatttcttaaaattaaaaatttagaatttgtgcaagcgtcaaagacattaggggtttcaaatttgaggttaatattcaaacacatattacctaatacactaggtgcaataatagttacttcgatgttcacagttccaagcgcaattttttttgaagcctttttaagttttattggaattggtgtacctgcacctcaaacatcattaggttcattagtgaatgatggtaaatcaatgctattaatttatccgcatgagttattcatacctgcaacaattttaagtcttttaattttatttttctatttatttagtgatgggctgcgcgatgcgtttgatcctaaaatgcgtaaataagggtgtgttttaatgatgaaaaaagtattggaagtaaaaaatctagaagtttctttcgaagttgaagatggcatagttaatgcagtgagaggaattgattattgcatacatgagggagaaatactagcaattgttggagaatcaggatcaggtaaatcagttgctactaaagcaattactaaattgttccaaggggaaaatggaaaaatcacaaatggaaatgtgaagttttttggggaagatttagttgaaaaaaatgaaaaagaacttgctaagatacgtggaaaagatatagccatgatttttcaagatccaatgacatcactaaaccctacaatgcaaataggtaaacagattatggaaccgttgatgatacataaaaaaatgaatagaaaagatgccaaaggaaaagccgtagagattttagatttagtaggtataaaaaatgctgaattaagatttaaagattacccacatcaattttctggtggacaacgtcaaaggattgtaataggtatggctctagcatgcgaaccaaagttattaattgctgatgagccaaccactgcattagatgtaactatgcaatcgcaaattattgatttaatgaaaatattacaaaagaaaacaaatactgcaattatttttattactcatgatttaggagtcgttgctaacattgcagacatagtgtcagttatgtattgtggtgaaattattgagacaggaaaagtagaagaattgttttattatcccaaacatccatatacatgggggcttcttgcttcaatgccgacattagagtctaattcaaagtcaaaattgattgcaattccaggaacaccacctaacttgttgaagccacctattggtgatgcatttgcaagaagaagtgcatatgcgttaaatgttgattttaaatatgaagcgccatggtttcaattatcacctacacatttcgtaaaatcttggttactagatagcagggctccaaaagtaattccgccagaaactgttaagcgtaaatttaaagaactttcttataattttgagagaccgttaaaagtagaaggagtatcatttaatgaacaataatgtacttgttgaaattaaaaatttaaccaaaatttttaataaaaataaaaataatgaaataaaagcaattgacgacgtgagcattaatataaataaaggcgaggcgcttggtatagtaggagaatctggatgtggaaaatctacatttggaaagtccattattagattattagaagtaccagaagaaactatattctttgaaggaaaggatattaacaaaattacatctagaagagatagccttaacttaaacaaacggattcaaatgatttttcaagatccttatgcttcattaaatcctagacttaaagttatggatattgtgggtgaggggatagacatacataaattggcggaaaataaagctgaaagaaatgaaaaaatttataaattattagaattagtgggtctaaataaagaacatgcaaatcgctatccgcatgaattttcaggtggacaaaggcaaagaattggaattgcaagagcactatctgttgaaccagacttgattatcgcagatgaacctatttcagctctggatgtatcgatacaagcacaaataataaatatcattaaaaaattacaaaaagaaaggaatactacgcttttatttattgcacatgatttatcaatggttaaatatgtttcagatagaattgcagtcatgcacaaagggaaaatagttgagattgccagttctgaaagactatatcaaaatccattacataattatacaaaatcactaatttcagcaatacctcaaccagacccacaatatgaaagagaaagagttagggaaatttacaaggattcgtttgataataattctgagtacaaactaagggaaatagaaaaagatcattttgtgttcacaagtataaataaggcagaactattgagacaacgaaaactttaatgcttttagaaagggggaaactaaattatggaaatttcaaaattaaagtacttattattaaattttatttttgtattgatactttctggttgtagtaaagaaggtatatattctgataaaggacaagttttcaggaaagtaataccacaagatatgagtactttagatacaactttaataacagatgcagtttcaggtgatatatcaaatcaagtattcgaaggactttttacactagataaaaatgataaagcgaaattagcgttagccaaagaactacctaaaaaaagtaatggtggtaaaactttaacttttaaattaagaaaagacgctaaatggtctaacggtgatccagtaacagcgtatgattttgtatatgcgtggagaaaattagttgatccaaaaacaggatctgaatatgcttacataatgtctgacattgaaaatgcagatagtataaattctggtaaattaccagttgaaaagttaggtattaaagcattaagtaaatatgaacttgagataaagttgaaaagacctataccatacataaatgaattgttagctttaagtaatttttatccacaaaacgaaaaagttgcgaaaaagtatggagaaaagtatggtttgaaacctcaaaatgcagtttataatgggccgtttaaggttgatacttggagagcagaagataagatacttttgtctaagaataatttctattgggataaaaagaacgtaaaattagataaagttaattataaaatattgaaagataaacaagctggtgcttcattatttgaaacaggatctgttgatgatacattaattttagccgatcaagtaaaaaaatatgagaattctagtgctttacaaaagcgtataacttcaggtaattttttcataaaatttaatcaaaaaaaggtcgaagaatttaaaaatcaagatttacgcatggcaatagcattagcaatcgataaaaaaggatatgttgaagcagttaaaaatgatggttctatatacagtaatacatttacagccaaaggtgtcgcaaaacttagtaatggtgatgattatttatcaagtataaattcaccattaaagtatgataagaaagaagcgttgaaacattgggaaaaagcaaagaaagagctaaatataaaaaacttcacattttcaatgaatactgaagatacaccagattcaaaaatctcagcagagtacattaaggcacaaatagaaaaaaatttacctggtgtaaaaatgaaaattagacaactacctttcaaacagagattaagtgaagaatttaaaatgacatatgaaacatcattaactggttgggctgctgattatcccgatccaacaacttatttgtcgacaatgacaaaagataatccccaaaataatacagactggagtaataaaaaatatgacgattatttaggtgaaataaacggagaattattaggggaagttagcaagagagataatagaatgaaagaagatgaagagttattgttaaatgatgtgcctctagctccaatttatcaaaagggagaagcacatttaactaatcctaaagtaaaaggtcttcaataccatgttgtaggtccagatacaacattaaagtatgtatatatagataaataataacttttaaaggctaataaaatgtgattataaaaaatggacattgtgaaaaacagcagtaagataatttcaattagaagtttacttactgctgttttatttctgtatttatgtttattttatctcttacgtcctaaacccatcgctttttccatttttttgacagttttaaatgaaactttgtgtgctttatctctaccttgatctaaaatatcatcaagtttatctgagttatagaaactttcgtatttttcttggaattctactaaaaatgctttaactatttcagcaaggtcgcctttgaatttaccgtaaccttcgccttcatattttgcctcaatatctttgattggcatgtctgttaatccagcgtatattgaaattaaatttgtaatacctggtttattgtcgcggtcgaatttaataataccgtctgaatcagtcacagcacttttaatttttttagcagcaacatttggttcgtctaataatgaaataaagtttttagcgttgtcatcacttttactcatttttcttgttggatcttgtaaactcataacacggccaccaactttaggcatacgaatttcaggtttcacaaggacatcattataacgactattaaatctatctacaagattacgtgttaattcaatgtgctgcttttggtcatcgccaactggaacgatattagtattgtaaagaacaatatcagctgccattaaaggtggatatgttaatagaccagctggtataccttcaactgctttctgagctttatctttgtattgcgtcatacgctctaattcgccaacagaagcaatcgtagttaacatccatcctgcttgtacgtgtgcagggacttcagattgtatgaacaatgttgctttgtctggatctataccagaagctaaataaattgctgctaattgtctagtttgtttacgtaattttaagcgatcttgtggcattgtaattgcatgttgatctacgatacagaaataacaatcgtagtcattttgcacatcaacaaattgttttagtgcgccaatataatttccaatagtaggaattccactaggttggatgcctgaaaataatgtctccatttaaatgcctactttcttagtaatattttaataattatcattataacagtatttcttaaaaatgtaagatgtgttagaatatacgtataacttgctactaacaaagggattaataatcttttttataagtgtagaaacttatctgaaaaattaggtttttctcatttaattttaatgttagatagttataataaatagtaacgattaagaattttagaaaaaaatgttttttcttgatctataactaaattttaagcaatgaattttattcattcaaataggagagtgagatgtatggtaacattatttacttcaccaagttgcacatcttgccgtaaagcgaaagcatggttacaagaacatgacattccgtatacggagcgtaatattttttctgaacatttaacaattgatgaaattaagcaaatattaaaaatgactgaagacggtactgatgaaatcatttctacacgttctaaaacataccaaaaattaaatgttgatattgattcactaccattacaagacttatattcaatcattcaagataatcctggcttattacgtcgtccaattattttagataataaacgactacaagttggttataatgaggacgagattcgacgtttcttacctagaaaagttcgtacgttccaattacaagaagcacaacgtatggttgactaataaccatttaactatgtgtcatactttactaaaagatatgtcaagcaacactatttctatagtgttgcttttttggttttaattttacaataattgcttagtatcttttaaatcaaatgtgcaattgttaatatagctctatattagagtgttttggatgaaacatttgctatgataaggtaaaattaaattaagaaagtgctttaatgctttaactgtataaatcatttaaatagttttgctacaacgaatatgttattataagttaccaaaatattttagagaaagaaatcaaacaaatatattgtattttgtttgatgctttaatacaatgtggatactattcatcgactgtaaggagtgagatgatatgagaatagaacgagtagatgatacaactgtaaaattgtttataacatatagcgatatcgaggcccgtggatttagtcgtgaagatttatggacaaatcgcaaacgtggagaagaattcttttggtcaatgatggatgaaattaacgaagaagaagattttgttgtagaaggtccattatggattcaagtacatgcctttgaaaaaggtgtcgaagttacaatttctaaatctaaaaatgaagatatgatgaatatgtctgatgatgatgcaactgatcaatttgatgaacaagttcaagaattgttagctcaaacattagaaggtgaagatcaattagaagaattattcgagcaacgaacaaaagaaaaagaggctcaaggttctaaacgtcaaaagtcttcagcacgtaaaaatacaagaacaatcattgtgaaatttaacgatttagaagatgttattaattatgcatatcatagcaatccaataactacagagtttgaagatttgttatatatggttgatagtacttattattatgctgtacattttgatagtcatgttgatcaagaggtcattaatgatagttacagtcaattgcttgaatttgcttatccaacagacagaacagaagtttatttaaatgactatgctaaaataattatgagtcataacgtaacagctcaagttcgacgttattttccagagacaactgaataatgatattaattaagcaacgaactatgaaaggagactctttggagtctctttttttattgatttcaaaagctgaaaaagtaatagtagttaaacttacgtgtaatattttgaggtgaagatatgttagtagctttaaatgaagaaaaggaacgcgtgttagcaactactgcattgagaaagacacaatatttttgtccggtgtgtggcaagcaagttattttaaagcgtgggctcaaagtaattagtcattttgcacataaacatttagcggaacaaaaatgttttaataatgaatcgattaaacattataaaagtaaattgattttagcacagatgatacagcaacaaggatgtaaagtagagatagagccatttttaaaagaaataaaacaaattccggatattttgattaataataaatatgttattgagctacagtattcgccaatttcttataaacagattcttcaacgaacggaaggtttaaagaaaatgggatataaagtaagttggttattaaatgatgttgattattgtcataataaagtgaagttcaatcattttcaaagtatgtttattaatccaatcactcgaaaacttcatacgttcaatttagagaaaaaacaaataatgatgtttcaacaaatacaatatataggcgggcacaaatatgtcgctgaaaaaaggaatgtcaaaatgagtgagttgtttaatgaggcgccttgtgattatcatgctgtttataaattatcaaaattcgcaattaatcaatatatcaaatattgtcgctggcaaaattctgttttagaacccactttaagtgcaatgtatcaattacagttaactgatcaagaagtagtgcacaattatggttatatttttccagagcaaatttatattgaaaatcatccaattgagtggcaattacaagttgatttatggttaaagaatggagaaagcatattagtaagtgacaatcttaattattttaaactgaaaaagtttattgttgctctagaaagtaaaacagcgattatagaaaaacttattaacaattatttaaatattagttcagatagaggtaatgacgtgcaaattttgttctaaaatgagaaaattatatcaattatattttattaggaggtttactacatatgagtcaacaattatcgagagaagaacaggaacgtaaatatcctgaatatacatgggacttaacaacaattttcaaagatgatgaagcttttgaggctgcatttaaagaagttgaaaatgagttaggcaaagaagaacaatttaaaggacacattggtgatagtgctgagacattatacaatgcgttagaattagaagatacattaggtactaaattagaaaaagtatatgtatacgcgcacctaaaacaagaccaagatacaacgaacgacaaatatactggtatggagtcaagagcacatcaattaattattaaatttagctcggcatggagtttcttagtgccagagattttacaaattgatgaagataaaattcaatcttttgtaaattcatatgataagttacaaaaatttgcttttgatttgaaattgattaatgaaaaacgtcctcatattttagatgctgaaactgaaaagttattaacagaagcgcaggacgcattatcaacgccatcaaatgtatacggtatgtttagcaacgctgatttagtatttgaagatgcgattgataaagatggaaatgcacacccgttaacacaaggtacatttattaagtatttagaatcagatgatcgcaaactaagagaaagtgcttttagaaatgtatataaagcatatggtgctcataataatacgcttggtgctacgctagcaggtgaagtgaagaaaaatgtatttaatgctcgtacacacaattacaaaactgcaagagaaaaagcattgagtaataatcatattccagaaaatgtatatgacaatctagtaaaaactgtacataaatatttaccattgctacatagatatactgaattgcgcaaagaattgctaggtttagatgacttgaaaatgtatgatttatatacaccattaattaaagatattaagtttgaaatgccttatgaagaagctaaagagtggatgttaaaagcattagaaccaatgggtgaagaatatttaaatgtagttaaagaaggcttaaacaatcgttgggtcgatgtctatgagaataaaggtaaacgttcaggtggctattcatcaggtgcacatttaactaatccatttattctacttaactggtctaatactatttcagacttatacacattagttcatgaatttggacattcagcacatagttacttcagtagaaaattccaaccgtcaaattctagtgactacactatttttgtcgctgaagtagcatcaacttgtaacgaagcgcttttaagtgattatatggataaacatcttgatgatgaaaaacgcttattattattaaaccaagaattagaacgtttcagagctacattattccgacaaacaatgttcgcagaatttgagcataaaattcatgcaattgaagaatcaggtgaaccattaacgccaactagaatgaatgaagaatatgccaaattaaataaattatactttggtgattctgtagaaactgatgaagatattagtaaggaatggtcacgtattccacacttctatatgaattattatgtatatcaatacgcaactggttacagtgcagctcaaagcttaagtcatcaaattttaacagaaggtaagccagcagtagatagatatattaatgaattcttgaaaaaaggtagctcaaattatccaattgagatattaaaaaatgctggtgtagatatgacaacacctgaaccaattgaacaagcttgtgaagtttttgaacaaaaattgaacgcttttgaaaaattaatgaaagcttagcgctgttgtattcgcttacattatgaacagattgtgacaatttaaattaagtactattaaaaggttgaaatgggagagatagcgtgttatattatgaacatgaaattaatcacataacaaacatacccctttgtttgaagtgaaaaatttctcccatcccctttgtttagcgtcgtgtattcagacacgacgtttttttatgttcttttttaataagagggaagtgaagttgtataaaaatgtattaaatatgcactttttatacattaacgattaatatatgtctattatgtaccaaattcataatttgtataattttcgaaccggttaaattcgaaaaacatcactaatatatttagatcgatgcgtaacattacgttctaataatttaatgttgcaaaattaagagtcaataaaaagacctcgttacatttatggtgtaagaggtctttaatttatttatttagatttgattttaggcattttagatttccagaaatcgccatctggatatttaagtttttcaattttttgttgaatagctaacttctttaactctttgtttaaaagtttttctggccattcataaatagtaagtaattcttccatcgttacaagttgttgttgctgtatataagtttctaatttaggaggaagattcttttcgataggtttacccatcaattcattaattatataagtatagatgtgatatgggtataatccttcgacttttaaaccttcttcatgaacatcttcactaaagaaaacgagagaaggggcttgttcgatttccatttctcttgcaatatgcaaatcaattttcaagctttcggttagtttacttttttgtaagtcgtctttaaatacctctaaatcaatacctgcattttgaatacagtcacaaatcattgattctgtaataatatctcttttaggtatgatttcattttgcattaaatgtataaatcgttcggcacgtacacgaccttgtaactcagctgctttataagctagggcgatgttatcaaagttggatgtactttgagcttggcatttcgttaatacttttaacgaaggatttaatatatgtctgatacgtatatattgattatattcaattcttaatttggataagattgctgataatttgaagcaatcggagctaaatggatcgaaaaatgaataaatttcgattttacttacaggtgatagattaatatcttcacgactcttattttccattattcgtaattctccagccatgtttattcacctacaattaattttaggaattcaccatatgattagcagttaatcttaagcgctcaaataaataatctccaacaccttgtggaaacgcagcgcgattaattgctgtctgcatattttctaaccatgcatctctttcaaattcagtgattgtaaaatccatatgtctttttcttagcataggatgtccgtgttcttcggtataaatgtttggaccgcccaaaaactgtgttaaaaattgtttttgtttacgacttgtttctgcaaaatctcctggaaacaggtgattaagtcgttcatccttttctacaagggtgtaaaaataatcaatcatatcgtataacgcttctttaccaatgatgtcatatggtgttgttgtcatttaatcacccattttcaaaaatttactgttacgaacttaagttaatatataactaatataacatgattttaaacatttgaaagaaatatgcatatttgccaatttaatttatattgtttgaaagtgtttcttttttcttaaaaaaacgttgaactttatttaaaggttgatgatgttcgaggtttagttcatttaataaagattggaacttttgtaaaccttgattatagtctttaacttcgaactctaactcataatccgtagtatcgaaatactcacttttatctaaaacgagtaaatcacctttatatttagtttcttggcgatatgtcgttaatgcaccaagtattgataaagttgtatcctttacaccaaactgttcaactataatttgacgaatgtcatctggaagattgtcgtttgaaataatcaagttcatctctggtttaatgtcgacgatatagttgtattctaatagaccaacctttgctggtgtctttaaagtcatttcatattgattgtctttaactcttatgcgtagtgcagagcgatgttcctttaatttgaaatcgggtgtatcaatatagtaattgatttgcttaaaaagcacactgtctttaaaatatttctcttgcaatttattatagattgatgcagttatcatttgtttaaattctatttcatgatttgttgccatgatatgtatacacctcgtatcaaattcaatttatcttaactatattatgaatgacaaagttgaattttaaaagtaatttcctttatctattatcaatgttaatttgaccattaaaaatagtgttcgtaagtgttttgtattattgaattgtgttaaaatgttatggaataagaggaggattaagcatgcgtttatatattaatgaaattaaaattaaagatgacatactttattgttatacagaagattctattaaaggattatctgaagtaggacaaatgctcgttgatagtgataattatgcctttgcgtatacattagatgatggtaaagcgtatgcttatctcattttcgtacaagaaacatggacgatgttgtatgaaaacatgactaaaaaaattattatcaatgatgaactagaattgactgaattccaccaagaacttacttatattttagacaacataaaaggaaataataattatggtaaggaatttgttgcaaccgttgaagaaacattcgacattgaataaagcggggtgaagcactatgaatcaatgggatcagttcttaacaccttataagcaagcggttgatgagttgaaagtgaaacttaaaggcatgcgcaaacaatatgaagttggtgaacaagcgtcgccaatagaatttgttactggtcgtgttaaaccaatcgctagtattatagataaggcaaacaaacgacaaataccatttgataggttaagagaagaaatgtacgatatcgctggtttaagaatgatgtgccaatttgttgaagatattgatgttgtcgtcaatattttaagacaaagaaaagattttaaagtaattgaagaacgagattatattcgtaacactaaagaaagtggttaccgctcgtatcatgtcattattgaatatccaatcgaaacattacaaggccaaaagtttatattggctgagattcagattcgtacattagcaatgaatttctgggcaacgattgaacatactttacgatataaatatgatggtgcttatccggatgaaattcaacatcgtttggaaagagcggcagaagcagcgtatttacttgatgaagagatgtctgaaattaaagatgaaattcaggaagctcaaaaatattacacgcaaaaacgttctaaaaaacatgaaaatgattaacgaggtgttataaatcatgcgttatacaattttaactaaaggtgactccaagtctaatgccttaaagcataaaatgatgaactatatgaaagattttcgcatgattgaggatagtgaaaatcctgaaattgttatttcagttggtggtgatggtacattactacaagcattccatcagtatagccacatgttatcaaaagtggcatttgttggagttcatacaggtcatttaggattttatgcggattggttacctcatgaagttgaaaaattaatcatcgaaattaataattcagaatttcaggtcattgaatatccattgcttgaaattattatgagatacaacgacaacggctatgaaacaaggtatttagcattaaatgaagcaacgatgaaaactgaaaatggctcaacacttgttgtggatgttaacttaagagggaaacactttgagcgatttagaggcgatggattatgtgtatcaacaccttcgggttcaacggcttataacaaagcgctaggtggcgcactgatacatccttcacttgaagcaatgcaaattacagaaattgcctcaataaataatcgtgtctttagaacggtaggatcaccacttgtattaccaaagcatcatacatgtttaatatcaccagttaatcatgataccattagaatgacgatagatcatgttagtatcaaacataaaaatgttaattcaatacaataccgtgtagcaaatgaaaaagtgaggtttgcacgttttagaccattcccattctggaaacgtgtacacgattctttcatatcaagtgatgaagaacgatgaaatttaagtatcatatatcacaacaagaaactgttaaaacttttttagcacgaaatgatttttccaagaagacagtgagcgccattaaaaataatggcgctttaattgttaatgatgaaccagtcacagtgcgtaagcaattaatgccaaatgatatattagaaattcatttaccgcgagaaataccgagtgttaatttaataccttatgctcgtaagctagaagtattgtatgaagatgcatttatcatcatagttactaaaccaaacaatcaaaattgtacgccttcgagagaacatcctcatgaaagtttaatcgaacaggtactatatcattgtcaggtacatggtgaaaatattaacccgcatattgttacgcgtctagatcgtaatacaactggtattgtgatattcgctaaatatggacatatccatcatttattttctaaagtaaacttgaaaaaaatatatacttgccttgtatatggtaaaacccatacatctggtattattgaagctaatattagacggtcaaaggatagtattataactagagaagttgcctcggatggtaaatacgctaaaacatcttatgaagtaataaatcaaaatgataaatatagtttgtgcaaagttcatttgcatacgggacgtacacatcaaattcgtgtacattttcaacatattgggcatccaattgtgggagattctttgtatgatggttttcatggtaaaattcatggtcaagtactgcaatgtacacaaatatattttgttcatccaattaataagaacaatatttatattacaattgattataagcaattacttaaattattcaatcaactctaattcacacagggggtgtaagtatgtcaatgaacacagatgaaaaagagcgtgttcaagaggaattatatgatgagacattattagatcaatacttagaaaatgatgatattgatcaatttagagatgaatttctagcattacacacatatgaacaaagtgagtattttgaagatactaccgatgaaaatagacaaaagatttttcaatatttatcacctgaagaggttgcaaatttctttgatcaattagatattgatgacgatgaatatgagttgctatttgataagatgaatgcgacatacgctagtcacatattagaagaaatgtcatacgataatgcagtagatattttaaatgagttgactaaaccaaaagttgctagtcttttaacattgatgaataaagatgacgcgaatgaaatcaaagcattacttcactatgatgaggatacggccggcggtattatgacgacggagtatttatcacttaaagcgcatacgcctgttaaagaagcgttattattggtcaaagcgcaagcgccagacgcagaaacaatctatgttatctttgtcgttgatgatgatggtaaattagtaggtgttttgtcgcttagagatttaattgtagctgaaaatgatgcttatattgaagatattatgaatgaacgtgtcattagtgtgaatgtagcagacgaccaagaagatgttgctcaagttatgagagactatgatttcatggccgtacctgttatagattaccaagaacatttgcttggtatcatcacgattgatgatattttagacgttatggatgaagaggctagtgaagactactctcgtttagccggggtttcagatatcgattcgactaatgattcaatcattaaaacagcattaaagcgtttaccatggttgattattttaacatttttaggaatgattactgcgacaattttagggagattcgaaaaaacattagaaaatgtagcgctactcgcagcgtttattcctataattagtggtatgtcaggaaattcaggtacacaatctttagccgtttcagttcgtaacattacgacaggggaaattaatgagcaaagtaaatttagaattgcattaagagaagcgggaagtggtgtattatcgggtgttgtatgttcaacaatattatttacaattattgttgcaatatatcatcagccacttttagcattaatcgttgcaggaagtttaacttgtgcgatgacggtggggacgtttgtaggttcgatgattccattattgatgaataaattgaatatcgatccagcagtggctagtggaccatttattacaacaattaatgatattattagtatgttgatttattttggtttagctacatcatttatggcttacttaatttaaggaggagttatggagtttttatctttagttattgttgttttagcagcgtttttaactccaataattgtcaatcgattaaacattaatttcttgccagttgttgttgcagaaattttgatggggattgtgattggaaattcatttctaaatatagtagaaagggattcaattctaaatattttatcaacgttaggctttatctttttaatgtttttaagtggtttagaaatcgattttaaagcttttaaaaaagataaacgcgcacgtcaaggacaaaatgatgatgaatcctcaattccaggacatcttaatctagcgttaactgtatttgcatttattatgattatttcgatccttttagcgtatgtatttaaatggcttggattagtggatgatgtgttattaatggtcattatcatttcaactatttccttaggcgtagttgttccaactttaaaagaaatgaatattatgagaacaactataggtcaatttatcctattagtagcagtacttgcggatttagtaactatgattttattaacggtctatggtgcaatcaatggtcaaggcggcagtacaatatggttaataggtatattagttgttttcacagcaatttcatatattttaggtgttcaatttaaaagaatgtcatttttacaaaaattgatggatggtacgacgcaaatcggtattcgtgcggtatttgcattaataatattattagtagccctagcagagggagttggcgcagaaaatatattaggtgcattcttagcaggtgtcgttgtttcattattaaatccagatgaagaaatggttgaaaagttagactcatttggttatgggttctttattcctattttctttataatggttggtgtagatttaaacataccttcattaattaaagaaccgaaattactaattatcataccgattttaatcgttgcatttatcatttcaaaattaattccagtcatgtttattcgacgttggtttgatatgaaaacaacgattgcatcagcatttttattaacatcaacattatcgctcgtgatagctgcagccaaaatttcagaaagattaaatgctatttcagctgaaacgtcaggtatattaattttaagcgcagtcattacatgtgtattcgttccgattattttcaaaaaactgtttccagttccagatgagtttaaccgtaaaattgaagttagtttaattggtaaaaatcaattaacgattcctatagcgcaaaatttaacatctcagttatatgacgtgacattatattatcgcaaagatttgagtgatcgtcgtcaattgtcggatgatatcactatgatagaaattgctgattatgaacaagatgttttagagcgactaggtctgtttgaccgagacatagttgtttgtgccacgaatgacgatgatattaaccgaaaagttgctaaattagccaaagcacatcaagttgagcgtgtcatttgcagacttgaaagcacaacggacgatacagagttagttgattcaggtattgaaattttcagtagctacttaagtaataaaatcttattaaaaggtttaattgaaacacctaacatgttgaatttattaagtaatgttgaaacgtcactatatgaaattcaaatgttaaattataaatatgaaaatattcaattacgtaatttcccattcggaggagacatcatattcgtgcgtattatccgtaataatgagtcgattgttccgcatggagatacacaattgcgatatggtgatcgcttaattgttaccggtgctaaagaatacgttgatgaattgaaacaagagttagaattttatttttaacaataatgatattaaaatgcagacgtattttagtacgacgtaaaattaatgattttaaaatgcttgtatgtatatgattttgataaatacatgctttttacgtaaatcaagtttgatacagaaaggactaaatcaaacatttatcgttgtaatacgtttaaataactttattaaaaagtcataatagtgttaaaatgtattgacgagtaaaaagttagttaaaactgggattagatattctatccgttaaattaattattataaggagttatcttacatgttaaatcttgaaaacaaaacatatgtcatcatgggaatcgctaataagcgtagtattgcttttggtgtcgctaaagttttagatcaattaggtgctaaattagtatttacttaccgtaaagaacgtagccgtaaagagcttgaaaaattattagaacaattaaatcaaccagaagcgtacttatatcaaattgatgttcaaagcgatgaagaggttattaatggttttgagcaaattggtaaagatgttggcaatattgatggtgtatatcattcaatcgcatttgctaatatggaagacttacgcggacgcttttctgaaacttcacgtgaaggtttcttgttagctcaagacattagttcttactcactaactatcgttgctcatgaagctaaaaaattaatgccagaaggtggtagcattgttgcaacaacatatttaggtggcgaattcgcagttcaaaactataatgtgatgggtgttgctaaagcgagcttagaagcaaatgttaaatatttagcattagacttaggtccagataatattcgcgttaatgcaatttcagctggtccaatccgtacattaagtgcaaaaggtgtgggtggtttcaatacaattcttaaagaaatcgaagagcgtgcacctttaaaacgtaatgttgatcaagtagaagtaggtaaaactgcggcttacttattaagtgacttatcaagtggcgttacaggtgaaaatattcatgtagatagcggattccacgcaattaaataatatcattcaacagctttgttcacgttattatatatgtgagcaaagctttttttgcttttataataatcggactgatggaaaattatttgatatttcatctgactgatttttttatgcacaaaaaaatcgcttcaaaagctgtagtttcaacttttgaggcgatagtatcttatattattaaaagacatccacagaattagtccttaacattactgtttgctttatcaataatgcgttggcggtatttgaaaatattactaacaaccgttttaagtacagcatataatggcactgcaatcagaactaatgtaaagccacctaaatctcctgctgctaaaataacaacgataattgttaaaggatggatacttaaagatttacccattacatttggtgtaatgatattaccttcaagttggtgtgcaattagtgtaatgatacaaacccatataaatgtagtaggactatctataataccgagtattgctgcaggtgcaaatgataaccatgaacctaagaaaggaattaagtttgcgacaccagcaaatagtactaataaaggaatatatggtaagtcaataattgaataaccgatatataagaatatacctaaaataacactgacagttacttgaccttgaatgtaagattttaatgtaaagtttaaatcagttaataaatctacgaaaaatactttacgttcacctttgaaaaatttagcaacagctgggataaatttttcatggtcttttaacatataaattaagaagaatggaaccataatcaataagaagatggttgaaattaatgatgtaatgtactgtaatgaattagataaaatattagtaacgccatcacccattgatttaaccatatttgtaattctacttgttacatcttcaggtaatttatccatttgagctagtgcgaatttaataatttgctctgcttctttttgtagggcaggtgtctgactaattaaattgttgatatttgaaatgatgattggtgcaacaaacgcaacaattaagccgataatagcaaacaaagctaacatgattgttgttatactagcccatcttggaaaaccgactttttcaagtaagttttgaaaaggtagacagatataaaataaaaaaccactaattaaaaatggaagaaatacagaaccgatgattgtagctattggagtaaatacttcgtgcacttccataaatagtttgatgagaatgaacagcataatcagagcaatgccagttcggaaccaaaccttgtttaacataaacgatgttcctcctatttttctaaacttagttattatttagtatatcctaaatagcagtgcttaaaaaggttaatattttttaattatacttaaattaaccattcactttctattttaagatatttactttcaatagtttgtgagacttttcaatgactcgtaagtctgcaaatggatcaaacagtaccaatttatatgaataacttattttaatattaaacgtgtttaaataatgaaatgatcatattattatttataagaatattctgaaaaatatattgaagtgtctcgtgcttaatcgtataatatttttatgtttaaacaatagggggaatcttatgattgaaaaattagtaacctttttaaatgaggttgtttggagtaagccattagtttatggtttgctaattactggtgtgctatttacattgcgtatgcgattttttcaagttagacattttaaagaaatgattcgattaatgtttcaaggagagaagtctcctaatggtatttcaagttttcaagcgatagccatgtctttagcaggcagggttggtacaggtaatattgtcggtgtatctactgcaatatttataggaggacctggtgcagtattttggatgtggattactgcgtttttaggtgcaagtagtgcttttattgaatctacacttggtcaaatattcaagagagttgaaaataatgaataccgtggtggaccagcgtattatatagaatatggtattggtggtaaatttggtaaaatttacggaattatctttgctattgttacgattatctcagtaggtctattgcttcctggtgtgcaatctaacgctatagcaagttctatgcacaatgcgattcatgttccacaatggttaatgggtggtattgttgtagttattttgggattaattatttttggtggtgtacgtagtattgccaatgttgcaacagccgttgtaccatttatggcaattatttacatactaatggctgtcattatcatttgtatcaatatacaagaagtgccagcgttatttgcattaattttcaaatcagcatttggattacaatctgcttttggtggtatcgttggcgcaatgatagagattggtgttaaacgtggattatactcaaatgaggctggtcaaggtacaggtccacacgcagcagcggcagcagaagtatcacatccaagtaaacaaggtctagtacaagcattttcagtttatattgacacattatttgtatgtactgcaactgctctgattatacttatttctggtacatataatgtgactgatggtacggttaatgcgaatggcacaccgcatttaattaaagacggtgggatttatgttgaaaatgcaacaggtaaagattattcaggtactgcgatgtatgcacaagccggcattgataaagcattccatggcagtggttatcaatttgatcctacattctctggcgtaggttcgtactttattgcatttgctttattcttctttgcatttactacaattttgtcgtactactacattacagaaacaaatgttgcttatttaacgcgtaatcaaaataatcaagtttcatcggtatttattaatattgcacgtgtgattattttattcgctacattttacggtgcagttaaaacagctgatgtagcatgggcattcggtgatttaggtgtaggtctaatggcttggttaaatatcattgcgatttggattttacataagcctgccgtaaatgctttaaaagattatgaaattcaaaagaaacgattaggtagcggttataatgcagtttatcaacctgatacgaagaaattaccaaatgctattttttggttgaagacgtatccagaacgtttaaaacaagcacgtgccaaaaagtaatctacttttgtttatagtatatgtagtaatcatttgataaaaaagaaaagtattgagaattttaggtgctcagaaatttgaattttaaaatatagtgtctcttggtacaataataatacaattactagggggcacttttttatgttggaatttaaagctggaaagattaataaacatgttttatatagtgatattttaaatagagatgtcacactaagtatttatttgccagaatcttataatcaacttgttaaatataatgtcattctttgctttgacggattagattttttacgtttcgggagaatacaacgtacatatgaatcgttaatcaaagaagcgcgtattgatgatgcgattattgtcggattccattatgaagacgttgataagcgtagagaggaatttcatccacaaggaagtcgttctcatttaactattcaatcagtcggtaaagaaatattgccatttattgattcgacgttttctacactgaaagtaggtaatgcaaggttattagtaggggatagtttagcgggtagtattgccttattaacggcgttgacctatccaacgatttttagtcgtgtagcaatgttaagtccacattcagatgaaaaagtattagataagctaaatcaatgtgctaataaagaacaattgacaatttggcatgtcattggtctgaatgaaaaagatttcactttaccaacaaatggtaagcgtgctgatttcttaacaccgaatagagaattagctgaacaaattaagaaatataatataacttattattacgatgaatttgaaggtggtcaccaatggaaagattggaaaccattgctgtcagatatattattgtattttttaagtaaaaacacagatgatcaactttatgaataatttacattagtagatttagtatgaattgtcttcatatagtctagtctataatgtaatttataaaagactttactgtttaatttaatttaaatttgtcgaaattgcaaaagatgtataatgaattatttttaatgtaacggttttcaaagaaatttgatataatagcaataggttaaacaaaggaggaattcagatgattttaggattagcattaattccatcaaagtcatttcaagaagcggtggattcttaccgtaaaagatatgataaacagtattcacgaattaaaccacatgtgacaattaaagcaccatttgaaattgaagatggtgatttagattctgtcattgaacaggttagagctcgtattaatggtataccagcagtagaagttcatgctacaaaagcttctagcttcaaaccaacgaacaatgtgatttactttaaagttgcaaagacggacgacttagaagaattgtttaatcgctttaatggagaagatttctatggagaagctgaacatgtttttgtgccacactttacaatagcacaaggactatctagccaagaattcgaagatatttttggtcaagtagcattagctggggtagaccataaagaaattatcgatgaattaactttgttacgttttgacgatgacgaagataaatggaaagttattgaaacgtttaaattagcttaagtaacataatagtattgttaatcgtagtatgtttgaattaataagaaaatggtcatttttattgaatgtaataaaaatgaccattttctttattttaaaatacgttttaaccttacttagctttttctctatttgctataaagtagcttccataaaatacagctaagactaaaaagattaatgccgagaaataaaaagtattgtttaaattgttggtaaattgtgtaattaatccgccaaataatggcccaatcattgagccgaatccttggatactattaaaaacaccccaagtttcttcttgttcatctgatttgataaatcgtgccataaaggtattccatgctggtaataagatgccatacattagaccgatagctaaagcgataatccacacgatgtgaatattaacaatcatagatagagtaaaaattaatatcatgtataaaataaatccgcttagaatgacaccatacataaagtttctgctacggttatctatcagtttcgataaaaatagcatcgaaactgcacagccgataccaccaataatgattgcaacagtatattcaattgtgcttacgttaataaccttagtagcatatgttggtaatataggaactagggcagcaattgcggcaccttgtaaaagaataccagggaacaacaataaatggcgctttgtcacatcaacaatttgtctcaattgagctttaactggacgagtattataatttgttaactttacatcgacaaaataatataatatccaagcaattaaaacgactaaagacatcatgaaggcaaagcgtgttgggtgcactttgataagtagattcataaaaaccatacctaccaataggcctaacaaccatgaaaaataaacatagcccatttgtttgccacgtttatcttcttcaacactggataacataatgacccaaataggactaactgcaataccgagcatcatagcactaaatatgattacaaaaggtgatgctggaaaccaaataactaaaaataaacttgtaaatgctaaaataaatccagtcgttaaaacgatttttgtgccgaattttttcaataaaaagcctataacaaagtttgtagatgcatcagcaataaaatgtattgaaaatgctagagacgttattgctacagcaatggatgttactgttggcaagaaattaatatagcttaggatatacatgcctctcgcaaattccattaaaaataagataataagcattaaaatgaaatttttatgattagcgtaattatttaacgaagaatcttgcatataaaggaacctttccataaatctcttgtggttgtgatgaatgaccgattaaatcaagtaagtctctacatattgtctgtgtagcatacttaattttatcttgttccattgtactaatcatgttagttaattgctcattaccgttcgttaaacttgctacaatttttattgcttcttctggagtatcagcgattttaccaaagcctttttcttcaaagtaaagggcattttcaagctcttgaccaggtgcaggatttaggaaaatcattggaatacaacgggcgaaaccttcagttattgtgataccaccaggtttcgtaatcataagttgacttgatgccatccattcattcatgtgtttggtataacctagaatcaatacattctcgttagatttaaacttagctgttaaagaacgctttagctctttgctcttaccacaaatcataactacttgtgcatttgcacttttcgctaatatatcagtgatcatcgtgtcaaaacctttagatacaccaaatgcaccagctgacattaaaatagtttgcttatctggatctaagttgttgtctattaaccactgcttttgattaataggtgtttcaaatttgttatcaataggaatacctgtcactttaactgttgaaggatcaatacctacgtctatgaagtcttgtttcgtttcttttgttgccacataatatcttgttgaatacggcgtaatccagtttttatgtaagcgatagtctgtcatcactgtagcaactggaatattaatgttaaattgctcagttagtaccgacataactggtgtaggaaacgttaataatattaaatccggcttttcttttatcaataaattaattaatttattaagtccatagtatttgtagaaacatttgtctagtttatctgggcggctgtaataaaaccctttgtacatatttctaaaatatttaaagctattgatataccattttttacaaatagaagtcaaaattgggtgagcttccataaataaatcgtgctcaatgacgcttaaatggtctagattcatatcattaagttgattaacgatactctgtgtaacttgcatatgaccgttaccgaaagagccagtaataatcaatatctttttattttgagtaaccattaatagccaccctccgttagtttgaaaattttatttaagtgtaacttattttacggcattataaaagaaataaagacgcaaagtcgttacatttatagcattttaatcaatagatgaattgatacaaaataaaacgttattttataaagcaatttattgttctatgttttatttgtatatttaaaattatccagtatacaattatagcatatttttggaaacaattatgatattataccatgttacaagatggtttaataatttaagatgaaccataattgtgaaactaattcataataccgtatgttttatttttaatagtagaaattagaaaatgctgattagtaggatataacagtgaaattataaatttattaacatcaacaaaacgtgtataataaacatattgtagaaaaaggagcggttcagtttggatgcaagtacgttgtttaagaaagtaaaagtaaagcgtgtattgggttctttagaacaacaaatagatgatatcactactgattcacgtacagcgagagaaggtagcatttttgtcgcttcagttggatatactgtagacagtcataagttctgtcaaagtgtagctgatcaagggtgtaagttggtagtggtcaataaagaacaaccattaccagctaacgtaacacaagtggttgtgccggacacattaagagtagctagtattctagcacacacattatttgattatccgagtcatcagttagtgacatttggtgtaacgggtacaaatggtaaaacctctattgcgacgatgattcatttaattcaaagaaagttacaaaaaaatagtgcatatttaggaactaatggtttccaaattaatgaaacaaagacaaaaggtgcaaatacgacaccagaaacagtttctttgactaagaaaattaaagaagcagttgatgcaggcgctgaatccatgacattagaagtatcaagccatggcttagtattaggacgactgcgaggcgttgaatttgacgttgcaatattttcaaatttaacacaagaccatttagattttcatggcacaatggaagcatacggacacgcgaagtctttattgtttagtcaattaggtgaagatttgtcgaaagaaaagtatatcgtgttaaacaatgacgattcattttctgagtatttaagaacagtgacgccttatgaagtatttagttatggaattgatgaggaagcccaatttatggctaaaaatattcaagaatctttacaaggtgtcagctttgattttgtaacgccttttggaacttacccagtaaaatcgccttatgttggtaagtttaatatttctaatattatggcggcaatgattgcggtgtggagtaaaggtacatctttagaaacgattattaaagctgttgaaaatttagaacctgttgaagggcgattagaagttttagatccttcgttacctattgatttaattatcgattatgcacatacagctgatggtatgaacaaattaatcgatgcagtacagccttttgtaaagcaaaagttgatatttttagttggtatggcaggcgaacgtgatttaactaaaacgcctgaaatggggcgagttgcctgtcgtgcagattatgtcattttcacacctgataatccggcaaatgatgacccgaaaatgttaacagcagaattagccaaaggtgcgacacatcaaaactatattgaatttgatgatcgtgcagaagggataaaacatgcaattgacatagctgagcctggggatactgtcgttttagcatcaaaaggaagagaaccatatcaaatcatgccagggcatattaaggtgccacatcgagatgatttaattggccttgaagcagcttacaaaaagttcggtggtggccctgttggtcaataaaagacttattgatgaaggtaaaactattgatgtttatttattcgaagcattaaatgaccagataatcattgctataccagattggttttggtcatatcagatggcaatggcattagatgaagaaacttgttttgaagcaatacttatgcaattgtttgtttttaaagaagaggaagaggcagagtcgattgcatcacaactaacagattggatagaaacatataaaaaggagaaagactaatgaacttaaagcaagaagttgagtctagaaagacttttgcgattatttcacatcccgatgcagggaaaacaacgttaactgaaaaactattgtacttcagtggtgccattcgtgaagcgggtacagttaaagggaagaagactggtaaatttgcgacaagtgactggatgaaagttgaacaagagcgtggtatttctgtaacaagttcagtaatgcaatttgattacgatgattataaaatcaatatcttagatacaccaggacatgaagacttttcagaagatacgtatagaacattaatggcagttgacagtgctgtaatggtcatagactgtgcaaaaggtattgaaccacaaacattgaagttatttaaagtttgtaaaatgcgtggtattccaatctttacattcattaataaattagaccgagtaggtaaagaaccatttgaattattagatgaaatcgaagatacattaaatattgaaacataccctatgaattggccaattggtatggggcaaagtttctttggcatcattgatagaaagtctaaaacaattgaaccatttagagatgaagaaaatatattacatttgaatgatgattttgagttggaagaagatcatgcaattacaaatgatagtgcttttgaacaagcgattgaagaattaatgttggttgaagaagcgggtgaagcctttgataatgacgcgctgttgagtggagacttaacacctgtatttttcggttcagctttagctaactttggtgtacagaatttcttaaatgcatatgttgattttgcgccgatgccaaatgcgagacaaacaaaagaagagattgaagtaagcccgtttgatgattcattttcaggatttatctttaaaattcaagccaacatggaccctaaacaccgtgatagaattgcctttatgcgtgtcgttagtggtgcatttgaacgtggtatggatgttactttgcaacgtactaataaaaagcaaaagatcacacgttcaacgtcatttatggcagacgataaagaaactgtgaatcatgctgtagcaggcgatatcattggactatatgatacaggtaattatcaaattggagatactttagttggtggaaaacaaacctacagtttccaagatttaccacaatttacgccagaaatttttatgaaagtttctgctaaaaacgttatgaaacagaagcatttccataaaggtattgaacaattagtacaagaaggtgcgattcaatactataaaacattacacacaaaccaaattattttaggtgctgttggtcagttacaatttgaagttttcgaacatagaatgaaaaatgaatataatgttgatgttgttatggagccagtaggccgtaaaattgcacgttggattgaaaatgaagaccaaattacagataagatgaacacatcaagatcgattttagtgaaagatagatatgacgatttagtattcttatttgaaaatgaatttgcaacaagatggttcgaagagaaattccctgaaattaaattgtatagtttactttaacggctcaatagtataatcgaatttgtgactttaaaaataattgtttcgttgaagaaaaataaattgtatattttaaaagaaaaaggtatactatgatgtatcaaatgaataacctatggcattttgtcagaggggagtaacttaagaatcatgaccgtataaatgattcgacactttatcgtcattacgaagatatcttccggtaaagtgggcaatttaaattgcttagtgagacctttgctatttatttagcataggtctttttgtttgtacttaacttatttatttaaaggagttgtacattttaatggatccaagtttgatcttaccttatttatgggtacttgtcgttttagtatttttagaaggcttattagcagcagataacgcgattgttatggctgtaatggttaagcacttaccacccgaacaacgtaaaaaagctttgttttacggtttgttaggtgcatttgtatttagatttttagcattattcttaattagtattatcgcgaacttttggtttattcaagctgcaggagcggtttacttaatttatatgtcaatcaaaaatctgtggcagttctttaaacacccagaaattgaaagtcctgaagctggagatgatcatcattatgatgaatctggtgaagagattaaagcaagtaacaaatcattctggggaactgtgttgaaaatagaatttgcagatatcgcatttgccattgattctatgcttgctgctttagctattgctgtaacacttcctaaagttggtattcactttggtggtatggacttaggtcagttcgtagtcatgttcctaggtggaatgattggtgttattctaatgcgttatgcagcaacatggttcgtagagctattaaacaaatatccaggacttgaaggtgcagccttcgcgattgttggttgggtaggtgttaagttagttgtcatggtattagcgcacccagacattgctgtattgcctgagcacttcccacatggcgtattatggcaatctattttctggacggtactaattggattagtaattatcggttggttaggttcagttgttaaaaataaaaaatcgcataaataaatgatgtgaagcggacaatcttaatttagtttaaggttgtcctttttcatttaattgagtgatttatgaaaaatggattttgaagaatgtgaatcaaaagatgcgatatagtattaagaaaatgtgccttttatatttagcattttttcaatagaaattatatagattttaaagcaaattaagtgttaatgtgtcataatgaaaagtgattttattgaatggagtggacattagtggatattggtaaaaaacatgtaattcctaaaagtcagtaccgacgtaagcgtcgtgaattcttccacaacgaagacagagaagaaaatttaaatcaacatcaagataaacaaaatatagataatacaacatcaaaaaaagcagataagcaaatacataaagattcaattgataagcacgaacgttttaaaaatagtttatcatcgcatttagaacagagaaaccgtgatgtgaatgagaacaaagctgaagaaagtaaaagtaatcagggtagtaagtcagcatataacaaagatcattatttaacagacgatgtatctaaaaaacaaaattcattagattcagtagaccaagatacagagaaatcaaaatattatgagcaaaatactgaagcgactttatcaactaattcaaccgataaagtagaatcaactgacatgagaaagctaagttcagataaaaacaaagttggtcatgaagagcaacatgtactttctaaaccttcagaacatgctaaagagactagaattgattttgagtcttcaagaactgattcagacagctcgatgcagacagagaaaataaaaaaagacagttcagatggaaataaaagtagtaatctgaaatctgaagtaatatcagacaaatcaaattcagtaccaatattgtcggaatctgatgatgaagtaaataatcagaagccattaactttgccggaagaacagaaattgaaaagacagcaaagtcaaaatgagcaaacaaaaacctatacatatggtgatagcgaacaaaacgacaagtctaatcatgaaaatgatttaagtcatcatacaccatcgataagtgatgataaagataacgttttgagagaagatcatattgttgacgataatcctgataatgatatcaatacacaatcattatcaaaaatagatgacgatcgaaaacttgatgaaaaaattcatgtcgaagataaacataaacaaaatgcagactcgtctgaaacggtgggatatcaaagtcagtcaagtgcatctcatcgtagctctgaaaaaagaaatattgctattaatgataatgataaattaaacggtcaaaaaccaaatacaaagacatcggcaaataatagtcaaaaaaaagctacatcaaaattgaacaaagggcgtgctacaaataataattatagtgacattttgaaaaagttttggatgatgtattggcctaaattagttattctaatgggtattattattctaattgttattttgaatgccatttttaataatgtgaataaaaatgatcgcatgaatgataataatgatgcagatgctcaaaaatatacgacaacgatgaaaaatgccaataacacagttaaatcggtcgttacagttgaaaatgaaacatcaaaagattcatcattacctaaagataaagcatctcaagacgaagtaggatcaggtgttgtatataaaaaatatggagatacgttatatattgttacgaatgcacacgttgtcggtgataaagaaaatcaaaaaataactttctcgaataataaaagtgttgttgggaaagtgcttggtaaagataaatggtcagatttagctgttgttaaagcaacttcttcagacagttcagtgaaagagatagctattggagattcaaataatttagtgctaggagagccaatattagtcgtaggtaatccacttggtgtagactttaaaggcactgtgacagaaggtattatttcaggtctgaacagaaatgttcctattgatttcgataaagataataaatatgatatgttgatgaaagctttccaaattgatgcatcagtaaatccaggtaactcgggtggtgctgtcgtcaatagagaaggaaaattaattggtgtagttgcagctaaaattagtatgccaaatgttgaaaatatgtcatttgcaatacctgttaatgaagtacaaaagattgtaaaagatttagaaacaaaaggtaaaattgactatccggatgtaggtgttaaaatgaagaatattgccaatctaaatagttttgaaagacaagcagttaaattgccaggaaaagttaagaacggtgttgttgtagatcaagttgacaacaatggtttagcagatcaatctggtctgaaaaaaggtgatgtaattactgaattagatggcaaacttttagaagatgatttacgctttaggcagattatatttagtcataaagatgacttgaaatcaattacagcgaagatttatagagatggtaaagaaaaagaaattaatattaaactaaaataatgttgaggtgaacaacgtgtcaatttttagccagtttttaaaaagatcaagccctcaacaaggtattgtattgtactatatcgtcgcaattgtcgttgcatttttattattaaacttaccgtatgttcataaaccaggtgtagaagtaaatccaattgacacattatttgttgccgtatccggaattagtgttactggattgtctccgataagtattgtcgatacctattctacatttggacaattaattatccttgtgatattaaatattggtggaattggcgtcatggcaattggtacgatgttatgggtggtactaggtaaacatattggaattagagaacgtcagttaattatgttagataataacaaaaacacaatgagtggtaccgtcaaattgattattgatattgtaaaatcaatttttgtaatcgaactcgtaggagccatgttattagcgttttacttttatcgagataatccagatttaaaatatgcaatcatgcaaggtgtttttgtttctatttctgccactaccaatggtggattagatattacaggtaagtcattaattccttatgcacatgattattttgtacaagcgatagttatatttttaataattttaggatcaatcggcttcccagtattattagaagttaaagcttatattcaaaatagggttactaattttagattttcattatttactaaaattacgacatcaacatatttattcctatttattgttggggtattagccattctattatttgaacataaccatgcgttcaaaggattaagttggcatcaatcgttattctattcgctgtttcaatcagcgactacaagaagtgcgggtcttcaaacaattgatgtgacaacactaagtgaccctacgaatattatcatgggtattttaatgtttataggttcttcgccaagttcggttggtggcggtattcgtacaacaactttcgctattttaattttgtttttaattaactttagtaataatgccgataaaacatccattaaagtttacaatagagaagtacacattatggatattcaacgttcatttgcagtatttacaatggcgacaattttaacatttttaggaatgctaattatatcagctactgaaaatggtaagcttacatttttacaagtattttttgaagtcatgtctgcatttggaacttgtggactatcgcttggtgtcacaagtgatattagtgatatttccaaggttgtactaatggtactcatgtttataggacgagttggcttaatatcatttatcattatgatagcaggacgtcgagaaccagataaattccattatccaaaagaacgtattcaaataggataatataatagcaatctaagtttagtttatgtagattttaactggaacttagattgcttttttagtttgtatttttaacttatactataagacgattggatttgaaaatggtaaactagtaacaatgagaggtgtaacatgatggaaaaaaatgaaaacattaatgtagagattttaactacgtcagatatgcatagtcatttcttaaatggtgattatggttcaaatatttatagagctggtacttatgttaaccaagtaagagcacaaaatcatcgcgtcattttattagatagtggcggaagtttagctggctcgttagcggcctattattatgctatagttgcaccttataaacgacatccaatgataaagttgatgaacagaatgcattatgatgctagcggtgtgagtccaagtgaattcaagtttggtttatcatttttaactcgttcaattgcattggcacgttttccatggttatcagcaaatattgaatacaatgttactaaggagccttatttttcaactccatattgtattaaacattttggtgacttaaaaattgctatcgtaggcgttacagcagatggtttaatggaaaatgagtattctgaaatggagcaagatgtatctattgaaaagacattagtggcatcaaaacgatggattagatatatccatgaagttgaagagccggattttttgattgtaatttatcatggtggattgaataaaattagtaatagcacgaaaaataaaaaggcaagttcgaatgaagctgaaaaattaatggaagaaattggtgttatagatttaatgattacagctcatcagcatcaaacaatagtaggtcaagatcatgaaacgtattatgttcaggctggtcaagatgcaaaagagcttgtacatctttcgattaattttaaaaagagaacaacaacttatgatgttgaaagcattgattctaaagtgattgacttaaatgagtatgaagaggaccaagaattattagatttaacattctatgatagaaaagcagtggcttattggtcacaggaaatcataagtgataaaggtttgatgttatcagtaaatgggttacaagatttagtctgtcaaacacatccattttcgcaattattacatgatgcaattcaccttgcatttgataatgatataacatgtgtccacgtgcctatgaacggagagaaggggttgaatggacagattcgaaatgaagatttgtatcatgcatacccttatccagataagccaatggatatgacaattagtggtcaaaatatcaaagatatattggagtatagttattcacatttagattttgttaacgagcaattaagcttaacaattattgatgaaacattatgtacaatgtggcaaggattcaattatgagattgatatgaatctagaacctgggcaacgagtaatgttagatcaaattgatttgactaagagttatagagttacaatgactgactattgttatcgtaactacaagaattatttaaaaaatgctattatacatgaatcatacgatgaaacaatgagtacattaattgcagagaagttaagagatccgaattatcttatttcatgtagtgataattttgtagttaaaaacaggtgaatattgctatgtaataaattaattataagtttaacaagtataaaaacctttcttagagaagattatctaggaaaggtttttagaattataaaattgatataaaagaacagtgaaattctcattcattatatatataagtaaacaaaaaagcttaaatggtatataccatttaagcaagtaacggaaacggagggattcgaaccctcgcgccgctttcgcgacctacacccttagcaggggcgcctcttcagccaacttgagtacgtttccaatggctccacaggtaggactcgaacctacgaccgatcggttaacagccgatagctctaccactgagctactgtggattaatttgtatgtgtttgaatatcaagcacaaatattattataacaagattaagttaatttgcaatagataccttaaaaaaatatgcagaacatttacactatatttataaaacattccgcatattttaaaaataaacaatttatttatcttcaaataaagaatagcgtgtcaatgcttcaaacacattcaatgtggctttattataatctattggttggtcgggattttttgatatcatgcgagattgtttatctaccatgtaatagtaaaaaatggaattgttatattgatgccataaactgtggtatgaaacatgaagaatgattgattcattattaataaatgtcactttacatttacgattttttaattctttgatactttcgatataatgcatatttaaccaaatattttcattttgtctgtcagaatgtgttgggaaaaaataagttggaaataatggtgttagtaaaataggtggtttactagaaatgccagtaatgcggtttgtctctgctttcttgccaagataagtattaccataaaatttgcaagagcgttcaatgattttctggactttaaaaggattttgaatacgcgttttgtcaaaccgaattatttcactaccatttctttgatcgtcatcatcaaatgctggtcgaataaccatgtctcctttgcgtatcacataaatattttgagaatacataagcaaaacctcgctttattaagttttaaaccattaatataaaaatacaattaatgatataaagatattttataataaaattctgagttgtcaagttattattttggtgaaaatgtacaataatttttaactaatagtcagaatattcattgatttcaaaattagaaaaatgtatacttattataaattaaagaaaggtagtggtttctatgaaatacaatactaatgttaaacatacaactttagaagcgtttgttacaaccgtcaatgatttgggtattgaattaattatcaatgaagcacttcgagaggtaagaaaacgacagctcatagaacttatagatgacgcactcgtcaataaagatgaagcagcatttaatcaatatacggcagaatacaaaaatttggaggcatttctcggtgaataacattgattcgaattccataacgcaatcttaaaaggactattcttaacatttcatacatgtaagaatagtcctttaatcgtttatgacattaatctaattaattcatgtctatctatgtcaccgaaatagtgatataaatcatattctgatagtgcttcttctatgtgctcaaagtcgtgtagacagccaactaatgcattttcaagatcagtgacatctccgacaccaaagaaatcaccgaaaatttttgcatgttcgattttacctcgtttaacatcaaacttgatttgtacaaatcctttttcaaatttttcctcgcgttcaaagttatatttagggtttctaccataattccattcccaagttctatatttgtcgttacttaacttttcaatattttcccaatcttcatccgttaatttatattcttctacttcagtttctccaaagatagttttcaagatgatttttttaaattcttcaatttctaaaggggcatttaaaaattcttgaatgtttgctactcgtttacgaacagatttaataccttttgatttaatcttagctggattaacttttagtgcattctgaacttcgtctaaatcactatttaacatcaacgtaccatgactaaacattctatttttaactttaaccatggcatttcctgagattttcgcttgtccaacttgaatatcgttacgaccagttaattcagcatttacgcctaaagattgtaatgcttgaacaattggttcagtgaatttttggaaattgtggaaactgttaccatcatcatctgttataaaactaaagtttaaatttccagtatcatgataaacagcgccaccaccagaaattcttctaactacatcgatgttatgagcatctatatatgtctgatttacttcttctatcgtattttgattctttccaacaatgatagatggtctatttatgtaaaataaaaagtaactttcttctgctggtaaattttttaaaacatattcttccattgctaagtttaaagttggatctgtaatattattattactaatgaatttcattacaatctctcccttatatctatatatattctctacttatttatgccttaactttgctgaaaatgccaattatatactcacaaatcgttctaaatatcggcttaaagttacattttattatttttgattgttaatagtttatttgttaagtgaattttagtacaatataatttagttatgatttaaggaggacttaaaatgactgttgcagaagtgggtaacattgttgagtttatggatggattaagaggtcgtgttgaaaaaatcaacgataactctgttattgttgacttaacaattatggaaaattttaatgaccttgatttaccggaaaaaactgttatcaatcataaacgatataagattgttgaataagaaggtaagttataatgaataaaatctcgaaggctttaacttggtttattataagtttcattatatttcatctcatattatttattatgtggggcgaacaccaagaatactggtatttatatacaggtataatgctaattgctggtatcagttatgtgttttatcaaagagatattgaatctaagcggttgcttacatcaattggtgttggtattattacggcaattattttaattatgcttcaacttttattctcacttataacttctaatttaagttatagttcattaattaaagaattagcaagaacaggtgtcaattggaagtggcaaatgttagtaactttactttttgtcattccatgtcacgagttatatatgagaactgttttacaaaaagaattaacacatttttcaataccgaaatgggtagctatattaataactgcaatttgttctagttcattatttatttatttagataattggtggatagtaacatttatatttgttgcacaagtgatattatcattaagttatgagtatactcgacgtatagcaacaacatccgttgcacaaattgtagctattatattgttattaatttttaatgcttaaataagcttttcttagacgtctgtgttctaagaaaagcttttttgctttagaatagcaatacgaagattcgaggcatgcttcattatagtgtacacgtttttaacggcaagctgttattattgagattaggttttagtcagtttttattactaaatattttataaaaatggtataatatctttcgagcaagttgaattgatggtggctatctgagtaaagggggtggtgcctatggcattactgaacacttttgaaaggaaaagcctattgtgatatctattgcaaatgcattacatttaatgttaagtttcggtatgtttatcgtcactttcattggtgtagtagtcgcaataattaatttaaacaataaaaaataaccatcatttcaaaactttgacaacgaatgatggttaaagcaaatctcatttagtcaccgtctttttaacgggctcattaggcgacatgttactgcatgtcgtctttttacatttttatagtaacatatcttttatttaattgtctatgtttattagatgtgtaacaaaattttgaagtatttttcgtatattgcctgctaaacatgtcagatttgaaaggaaaatcatactgtggtagaaatcaattatgattatatggtagtacttataaataagtgatttctattgaatatgtaatgaagttcatatattaataaaactttcattggtatagtagtcgcaataattaatttaagcaataaaaaataaccatcatttccaaactttgacaaagaataatggttaaagcaaatctcatttagtcaccgtcttttaacgggttcaataggcgacatgttcctgcatatcgtctatttatgcactgcgcaatttaataataatacaattatactttgatgtccatttaacataaaatactggaaatgtagaaaggtaaattcatcttgaaatattcagaaaattctgtataatttaaataaagagatatagattaaatataaagaggtgtttttaaatgaagaacaaaatttttggcgctatattatatttatctttagcacttggattatcaacagcagcttatgcatctacagaatacgcagaaggaggcacttggagtcacggtgtcggcagtaagtatgtttggtcgtattattatcatggtcataaaggacatggtgcaacagctattggaaaatacagatcatttagtggttatacaagagctggtgtaaaagcaaaagcatcagctactaaaaataattggtgggtcaatagagcatattataacatttattaaatactaaataatcatacaaaataaacaacgcaagaggtacaacatgaaatggttcaaattaatacttgatgttacaatcttcattctaattgctatattgttatttgtttatacatataaagaaaacgaagaaatattgcctgatactaaataccctatagcggtaactgactggaataaaaaatatagtaaaaatgagatttataaacgtataaatcaattcgcaaaaaatgagaacgtagcaatctataaatcaacttcaaattatacaaacaaaaacgtagataaagatatatatgtatttaataaagcaaaagcaacatctatcactccttttaatgctaaatataacattcattatttaagtgacgacgaattactaaaaaaggatatcaaagggagttattttgtaaaagacaaaaattttgacgtgtctaaattcataaattttttaaaagaatatggtgttactgctgaatcattcaaaatagatcatatgatgattgccgttggtgtcattaaacaaatgaatatagtagttccgttatcctcacttttaatcgtttattttatttattatattttcgaaaaaaacattaatttcaaagcgtatgcgattaagtatttaaatggttttacattaagaaaaataatttttgaaaatttttcgaaaaaatgcacttattgggtaacgttaatcataagtcaaattcttttaactacaagtgtactttggatattaaattacacgggtaatttagatttattcatattaagattagttctgctttcatgtcttttcattttaacgattagtgttattaatttatggactttcttaatgttactaaatctaaatattgccaatatgattaaaggtaagcagcactttaaaacaattcgttttattaatacagtttgtaaaagtattctcttagtactaatagctagtgtaatgatagaaaatactagtgttattaaagatttgaataaaataaaggaaactgagaaatattggaatgtattagatgattattacacgattgaatttgcaccttatcacgaaacgaaacaaagtttgattgataatatgctgcgatcagaacaattagtaaaggctagtgaagcagaaaataatgcgattttattcaaaccaaagggtgactccgttgacaatgacaacttttcgcctgatgaggggaatgtaatattagtaaataatcagttctggtcgatttatcataagcagtttcaacctgatattccgataaaaaatcaaaaaaataatgtcgaagtaattattccacaaaagtttcatgcaatgcgtaatgaaatcaatcaagcatatcattcatggtttgaatttgtacaaaataaaaataataaagagaataagttatctatacagtttatcaacaaaaatgattatcgaattttttcatttgatgcacgagatagtcgccatttgtcatttatagaggcgccaatcattgtgaatgttcaggcatcagatttatcgaatgatttttattatgccatgatcagtcaaggcgggtatttattcaaaaattatgacgcgctagtaaaaaatattgaaaagtatcatcttgatggggaaatcagtggaataaccaattataaagatagcgtaatggaaatgtatcatgaaaacaatttgaaattaactgtactcaacttttcacaaatcattatcgcaatcattttagtaattattattttatttgatgtgaaatattattttgaacagcatcgaaaattactcgtaatcaaaaagctatatggttattcaacattaagagccaattaccgatacttattaataaataatatagttgttatttttattggaatattgacgaatgtaattttacattctcactatataatgatgttatttgcaacgattcttgtcgttcaaatattattgcagatttgcagcctatactatcatggccgacgttttaatgaagttatcaaggagttttaactatgaaatttatcattgcaatattattaggattaatattatccattactattgcttttacaatcatacatcatcctatacttgatcgttttaatcctttcttaaaaacggagtacagttatgccaaagtgccaaaaggtacgcaacaatatgtgaatattacggcttatagtgaaagaggggaaaagcttgattataaattaacatttaatggattttcacctagtagaacgtatgtcgaaataaagcataaagggcaatatgtcatatcgatcacatatgttgaaaaagaggatacaccaaaagaggtaagacaagaatgatagaattaaaagatttaaccatacaaaaaggtaatacacatattttgaataaacttaatttgaaatttcaatgtggaaaatcatatgcacttattggtaaaagtggatgcggtaaatctacattattaaatactattgctggacttgaaaaaacagggaaacaatatgtctattttaatggtcaattagaacaatttaaatctaatttttacagagataaattagggtatttatttcaaaattatggattaatcgataatctgacagtatatgaaaatttagatattggattagcatataaaaaaataagtaagaaagaaaaagaacaattaaagatacgttatatagaacagtttggtctgtcaaacagtttaaaaagaaaagttcatacgctaagtggaggtgaacaacaacgtgtcgctttaattagaatgatgttaaaagatccgattgttatgttagctgatgaaccaactggtgcgttagatcctgaaacaggacagatgattattcaatcattatttgatttggtcgatgaaaataaagtgctgattttagcaacacatgatatggctattgcaaatcaatgtgatgaaataatagatttagaacagtatagaaaagtagcatctttgtgatatccaaaagataaaattaaaagccaatcaatgggaaatgttgacttcaacgctccgtttgattggcttttataatgtgttactaagttatgaaagtaacaacggcaaactgaaaaaaagcaatataataatatttaatacgagtagtaataaatgtaattgattttttgttttaatgtagcaaaaaacaatgactaaagatagcagcaatatcatgattgcacctgggaagaaccataatgctgaagctgcataccaaatcattggtaacgccataataataaaagatataagacaagaaaggataccaataatattataagttctagtcaaaattacacctccaattttcattttaaaatgacatgcataaaacaatcattttaaatacatcatacaataaaaataaattgtatgatagatgaatttgaaattaaattgaattggcttgattaaaaagtgattttatagaagataataaaaatggttgtttaatagataaccatgatattaacgacatggctgataaaatactgaagcttgttaataatgatgtattagcagaggagtttggttcgaaagcgagagaaaacattatagaaaaatattcaacggaatcaatattagaaaaatggttaaatcttttcaatagctaaatgaaaaaatcctaggtattcatgagtacctaggattttaatacatgatatttacaaaaaaagagaggatagtcctctcaaataatagttaataaaattgtaaccatttcttccagctgtaactactaatacaagctaagttcattacgatgtgtatgatttcaaattcataaccacttacatatcctcttgtaagtttaagtgtgaagattgagcccaacataacacaaatataaaatacattaacatatggcgttaaaaagccgataataagtgctaaacctccaacaacttcgccaattgacatcaatactgcgatcgtaggtggtaaacctaaagaacctaagaaatgaattgttccatctaaatctacaaatttcaaagtaccgtgtactaagaatgatgttgctagcatccatctaattaaaagcatacctaatttcatcatgtcacctccaacatacatttttttcttaaaacatagtccaaattatatttgtaaagatgtggaaagtaaagattatttataaaaataattattaaatatttattaaatgttctattgtattgaacaattgttgtagaaagatgtttaagtcatcagttactttttgtatttataaataaagattagtacagcatagtgcaaagtttataggtaaatgaattaattatggcatcaaaatatacgtatcttgaacactgttgtggaggcttagtagaagtgagaacaaacagaatgctactttaagcgatatggttaatattaattagtgcgtcattttcaaaattagaggtcatttgctgtataggattagaaattttgataatcaactatgataagaaaaaataatgaccatttaaatatattataagtttattaaatgataaaataataatatagttctctataaaaaatgtttggaggtaaatgtgtgaataggaatatcgttaaactagttgtgtttatgctaatcttagttgtagcagtagcgggttgtggtcaaaaagatactgaagagaaaactgatatgacgacaataaaagatgaattaggaactgaaaaaattaagaaaaatccgaaacgtgttgttgtattagaatatagttttgctgattatttagcagcattagatatgaaacctgttggtattgcagatgatggcagtactaaaaatataacaaagtcagtaagggataaaattggaacatatgaatcggttgggtctagaccacaaccgaatatggaagtgataagtaaattaaaaccggatttgattattgcagatgtcagcagacataagaaaatcaaatcagaattgagcaaaattgcgccgacaattatgttagtcagtggtacgggagattacaatgcaaatattgaagcatttaaaacagtcgctaaagcagttggcaaagagaaagaaggcgaaaagcgtctggaaaagcatgataaaatattagcggagattagaaagaaaattgaacagagtacgttaaaatctgcatttgcatttggtatctcaagagcaggtatgtttattaataatgaagatacatttatgggacaattcttaattaaaatgggtattcaacctgaagtcacaaaagacaaaactgcgcatgttggtgaacgcaagggtggcccttatatttatttaaataatgaagagcttgccaatatcaatccaaaagttatgattttagctacgaatggaaaaacagataaaaatagaacgaaattcattgatcctgcagtttggaaatcattaaaagctgtgaaagataataaagtttatgacgttgaccgaaataagtggttgcaatcaagaggtattatcgcaagtgaaagtatggcagaagatttagagaaaattgctgaaaaagcaaaataataaaatatagcgtcgctcgtttatcaaatgtgagagacgctatattttttatttatgtttattatctgtcggatgtgatgatttacctgaaagtttatttcgaataaatttaattacataaccgacaaggattgttttaacaattctttttatgaattggcgcattgttacatacctcatttctctttatcttatgaactatatacccattcatatatgctttttaaacgtcattgtcacaatttaatttttagggaatataatataaccgtctctgtctgcttttttagtaaaaatgacaaaaatggcatgtattattgagatgatggtagggatacctgtccagaaaaataataagtgaaaaagaccttgtccaaatttatcagcataaaatttatgaatacctaaacctccaagaaataatgcaacattaacataaatggctttattgactttcatttgtaaatcctccttaattataattctacttaaattcgttgtgaaaaccaatctttctaactttagaattttcaaactttctaaaattataagtatatctttttaaaataagctagaatttctatataataaatgttaataacgtaaaagggaatgatgacatagtgatacgtcaagcacgtccagaggaccgatttgatattgcgaagttagtttatatggtttgggatgatatggaattagaattggtaaagcatctacctaaagacatggtattagatgcaattgaaaaaagctgtattgatgcaacatatagaactttttatcagcatgttttagtttatgaaatagaaaataaagtagcaggttgtattattagctatagcggtgaaaatgaattgaaatatgaaaaagcatgggaacaacttgacttgccagaagaaataaaacaatatggcacgccattacctgtaaaagaagctaaagacgatgagtattatatagaaacaattgcgacatttgcagcatatagaggtagaggcatcgcgacaaagttattaacgtcattacttgaatcaaatacacatgttaaatggagtttgaattgcgatattaataatgaagcagcattaaagttatataaaaaagtaggctttatatctgatggacagattgaattatacaagcacatgtatcatcatttaattgttaaataaaaaactcgacagttcgatgtaagtcgattgccgagtagtatcattttatattaaatgcctgcaaataatgcactaatataaatacctaatgcatataataaaccgaaaaatgtatttgttttaccagcagcagccattgctggcatcattgtaggcggtgtatcattcttcttgaaacgtctgataactttaacaggcattgggaatgataacaacgcaagtaagtaaaataatgagccaccaggtttaataatgatcgtaagtacaataaaggcataagcgataaagtacatgattgccataaatgttaaagaagcatttttacctaatagaatgggtaaagttttacgaccacttgctttatctttgacacggtcgcgaatattgttagccatattaattaaaccgatagtgattactataggtacacttaaccaaattacatagctttgaatattgccagtttgaataaagaatgcaataacgataataaacatacccataaatacgcctgagaataattcaccgaaaggcgtccatgaaatagggaaagggccacctgtatataggtaaccaacagccatacatactaatccaactggtaataaccaaaatgaagagttagcagctaaaaacaaacctaatattgctgctaagatgtaaaatgcaatggctaatcgtagcacaagctctgggctcataccgttgcgtacaattgcaccaccaatgcctacagattcatgatcatcaaggccttttttataatcatagtattcgttaaacatattagttgccgcttgaataagtaagcatgctagtaacatggcaatgaataggctgattttaatatgatcttcgctaccaagaaaatatattttagatgctgctgtaccaactaaaacgggtactacggaagcagttaatgtatgaggacgcattaaatgccaatatttcttaactgtagaatattgctgatattgattactcattgaatacaaaacctctttaaatcatattttttataacaaagatattttaatagaaagtagcataaaggtcaattgacgtgaaaaattgcaagataagtttaagcaattcttgtaacacaattatccaaaaatgatacaatataataatgagtgaaaaaagacgaagaaagaagtgaaatggatggctacgggcgtattagaggacgatattgtcaaagagatatatgacagctcaaaggaatgggtttcagttgaagtgaaattatcacagtcactagacccgagcacattatttcatctcactgacaatgaggcaggagatcgcttttatatgcgtttgaatgataatcgaacgtcatattttggctacaaagcaattcaattattcaaaaataattctaaaaataaacaatctatttttaaagactgggaaaaattaaaacataacatcacatttatacatccgcaatctgagaaacatcatcttcgagttgttggagggttccaattttcaagtcataaatcagatgatgaatggcgagagtttggactaaatcattttgtattacccgaagttttaatttcaactgataataatgggacatttttaacttatacagttaaaagggaaagttttactgttgaggcattgaacgatttaatggatttgttcaacaatacatcggatatatatgtggacgagcaaattggggaaattactagaaatgaagatatttataaagatgactggcgtcaacttgtagtagaagcaatagaatctattaataatgaagaaaaaattgtactagcacgtagacggttaataaagttcgataaagatatcagtattccatatattctaaagcaagcatattctaaagaaaaaaacagttatatatttttgttagaatcacaagattctatattcttttcacaaacacctgaacaattaataaaggtcaataataaaatactatcgactaaagctgtagcaggtacaattaaacgttcacaaaatgaggacgaagatacaaaaaatgttgaagcatttttaaaagataataaaaacttaatcgaacatcgatttgttgttgacagtattttacatgatattaaaccttatatcactgaattacattatgataagacgcctaaaattctaaaaaatgatcatttatatcacttgtatactgaaattaaggcaccgcttaaagatgattcatatataagtttaattgatcatttacatccaacacctgcattaggtggatatccaaaagaatttgcaatggattttattgagcagaaagaatttggtacacgaggattatatggtgcgccggttggctatatagatatatatgatgattgtgaatttattgttgcaattcgttcgatgcttattaagaaagcacaagcaactttatttgctgggtgtggcattgttaaagattctgatccagatagtgaattggcagaaacgaaccttaagttcacacctatgatgaatgcattaggagtcgatatgaatgggaaatcataaagcagctttaacgaagcaagtttttacatttgcatctgagttatatgcgtacggcgtaagggaagtagttatcagtccgggatcacgctcaacgccacttgcacttgcatttgaagcacatccaaatattaaaacatggatacaccccgatgagcgaagtgcagcgttttttgcagttgggttaattaaaggcagtgaaagacctgtcgctatattatgtacgtcaggtacagcagcagcgaattatacgcctgcaattgctgaaagccaaattagtagaattccattaatcgttttaacaagtgaccgtccgcatgaattaagaagtgtaggcgcaccacaagcgattaatcaagtaaatatgtttaataattatgtaagttatgagttcgatatgcctattgcggatgatagtaaagagaccattgatgcaatttattatcaaatgcaaattgctagtcaatatttatatggaccacataaagggccgattcattttaacttgccatttagagatccgttaacacctgatttgaatgcaacagaattgttaacttctgagatgaagattttaccccactatcaaaaaagtatagatgcatcggcaataagacacattttaaataagaaaaaaggtttaattattgtaggggatatgcagcaccaagaagttgagcaaattctgacgtattcaacgatatatgatttgcctattttagctgatcctttaagtcatttaagaaaatttgatcatccgaatgttatctgtacatatgatttgttgtttagaagcggtttagacttaaaagtcgatttcgtaattcgtgttgggaaaccagtgatttctaaaaagttaaatcaatggttaaagaaaactgatgcatttcaaatattagtgcaaaataatgataagattgatgtctttccaatagcaccagatatttcttatgaaatatctgcgaatgatttctttaggtcattaatgggagacacgacagttaatcgtgtcaattggctagaaaaatggcaaagcttagagaaaaaagggcgccaagagattgaaaattatttggagcaagctacagatgagagtgcattcgttggtgaattgattaagaagacgtttgaagaggatgctttgtttattagtaatagtatgccaatcagagatattgataatttgttattaaacaaaaatatagacatctatgcaaatcgcggcgcaaatggtattgatggtatcgtatcaacagcgcttggtatggctgtgcataaacgagttacattattgataggtgatttgtcattttatcatgatatgaatggactattaatgtcaaaattaaataatattcagatgaatattgtattattgaacaacgatggtggcggtattttttcatatttaccacaaaaagaaagtgcaaccgtctattttgaacggttgtttggcacaccgacgggattggatttcgaatatacagctaagttatatcaattcgattttaaacgttttaacagtgtttcagaatttaaaaatgccacattgttatctgaaacttcgacgatttatgaattgataacgaatcgcgaagataactttaaacagcatcaaattttatatcagaaattgagtgaaatgattcatgacacattataattactatgaagcaaacgttgagaccaatcaagttttagtattactgcatggttttcttagcgacagtcgtacttatcataatcacatcgataaatataccgatatctgtcatgtcatcactatagacttaccaggacatggcgaagatcagtcttcaatggatgaaacgtggaattttgattatattacgacgttgttagatcgaattttagataaatataaagatcaatcgataacaatgctaggttactccatgggtgggcgtgttgcattatattatgcaattaatggtcacatccctatatctaatttgatattagaaagtacgtcaccaggtattaaagaagaagcaaatcaactagaacgtcgtcttgttgatgatgcacgtgctaaagtattagacatagcaggtattgaattatttgttaatgattgggaaaagttgccattatttcaatcgcaacaaggtttaccagttgaaatacaacatcaaataagacaacaacgattgtctcaatcgccacagaaaatggccaaagcattaagagattatggtacaggtcaaatgccaaacttatggccgcgcctgaaagaaattaaagtaccaacattaatattagctggagaatatgatgaaaaatttgtacagattgcgaaaaaaatggcaaatttaattcctaatagtaaatgtaaattaatttctgctacaggtcatacaattcatgtggaagatagtgatgaatttgatacaatgatattaggatttttaaaggaggagcaaaatgactaacagacaatgggaaacacttagagaatatgatgaaatcaaatatgaattttacgaagggattgctaaggtaacaataaatcgccctgaagtacgcaatgcgtttacacctaaaacagttgctgaaatgattgacgcattttcacgtgcacgtgatgatcaaaacgtttcagttatcgtattaactggtgaaggtgatttagcattctgttctggtggtgaccagaagaaacgtggacatggtggttatgtaggtgaagaccaaatccctcgcttaaatgtattagatttacagcgtttaattcgtattattccaaaaccggttatcgcgatggtaaaaggttatgctgtaggtggcggtaatgtactaaatgttgtttgtgacttaacgattgctgctgataatgctatttttggacaaactggtcctaaagtaggttcatttgatgcgggttatggttcaggatatttagcacgtatcgttggacataagaaagcacgtgaaatttggtacttatgtcgtcaatacaatgcacaagaagctttagatatgggtctagtaaatacagtggtacctttagaaaaagttgaagatgaaactgtacaatggtgtaaagagattatgaaacactcaccaacagctttacgattccttaaagcagctatgaatgctgacacagatggtttagctggtttacaacaaatggctggggatgcaacattgctttattacacaactgatgaagcgaaagaaggccgtgatgcgtttaaagaaaaacgtgatcctgacttcgatcaattccctaaattcccataagttattttgaatatgatattaagtcacttgcgtcgtatattagcgacgataggtggcttttttattttataagaatttaaaagggcattttaattaattatcataaagataagatagtttgagaaaattaatagagaaagaataaatgttaaagattattattacaatgaaaaaacgagctggtgagaaattgaattctcgccaacccgctttatgaagtgaaaccatttaaattagttatactaagcgctcataaacgattgggcgcgaagtaccaataccttgtttggatgacgtttgcatgaggatatgctgtgtatcatcataatcaagaatataaatgatttcttcattatcaaaagatgaaaatttaatgcgttgatgtgccgtatctataaaaagaatatgatattgattgtgacttgtatcatcgccatgacgtatacaaattgatttttgtaattgatgattactccaattaccaatgaataaattgatattggtttgttctagatgtgtgagtttggttgtgtcgtaaactaaatttataaattgtagttgatacatagttttacctgcctttaatcaatatctatattactttttagtaacctatcattgaaccataccagttataatcacgattgaatgataaatgtaataggcttgaatctgcatcttggattgataattctgtatcccaaggattccagtaaataagtttttcttggtcattaattttagcattaccaacaactgctagggcatgacctaaatgtgggtcattaggattttgagatacactttgagcaagaatcataatacccacattatcttttgtaagttgatcaacttgattatatgatggtacgccttcttgataatgaatgtctctgccttgtgatttaccgtattcaatcatttgattagggaatgttgcacaattaggaaggtcttgctcacttacttcagggtataatgtacgcataatatcatgtgcattataagtgtctgtatttttagttgcatttaataatgctgccatactgaatcctgcacaccatgagttatcgaattgttgttctctaattttgaagttttttagtgtgttttcatattgaacttgatcttcttgtatcgcttcgttttcttcaacttttgtaggtgttactgtagtttttagctcttgctttaattgtggtgaaactgttttagcactttctttttcttttatgttattagctagtggcgtagcttttactaatctaactttgccatcttcttcaaaataaaatcctttttcatcagtaagaacagtgatatttgaatttttatctttaatttggtctaaatctttagcgatgaagtttgaaattttaacactgtaattcatgtcttcttttgatttgtttaaatcatctttatttttagggctaagtgttaaagtataaacaattttaccgtcttttataactggataatagtaactattatcttcttcgccattaaatttataaattttaaaagcttcgccaagttcatatttaccagtttttgcattactttgtttatctaacgctttagcataaccagcaaattgttgttgagctagatcttttactttttgaggtactttgtcactcttaacattgatttcaagttgttttgaatgtgaatcggctttggctttattgttattagcaaatgcgcctagtgataaaataagcattgaaaccattatgatgcttataatattgaatactctagatttacatgaactattcatataataccctccatttaagtcaaaatattttgcgttgctaagtctttgcttctattttatctagacgaacttaattgttaattaagctgcatctggattgtcagaattattgttatcgccattatccgggttatttgggttgttaggttggtcagggttattagggttgtccgggttgttagggttatcaggattattaggattgtctggattatcagggttgttagggttatcaggattattaggttggtcatcgttggcaaaatggatatcttcaatattttgttttaagaagttgcgtacattttcattaataaatactgcaccgttaaattgatttggaacgccaccccaatgaatgccaatgacttcatttttttcattaaatacaggtgaacctgagttaccaccagttgtacttaaatcatattgcatagcttcaccttttaagtacgttatttttcctttactttcccacattgttgcgacaggtttatcaccaggatatcccgttacagtaatattttggttaacttgtgtttcagcattattactcattgttgctggtttaactacttcaccaatatgtttgttttgctcattaggggagaatttaactattgctaaatcaccttcgcctgaatatttagtgatttgttcagcagtgaaaccaccatttggataattatcttggttaattgcagaagggaatgcttttaaagcatgaggatcaccgtgcgtagcatctacgacgtgtttatttgttaaaagagtatctttacctacaactacaccagaagcaataaatgtaccagtaggtgcttcaacttgaatataagtaacaggtgcataatgaccattcgttgtatctgtgatttggtgacgatcgttatttggtaatataacattagcgcgttcacgttgttctaatggtttaaggttaccgcctttttgaatcttaggtgtttgctgtttgtctgtctgcgtttgttgtggatgattgtccatagcttttgaagataacgcatttgctgctggagaactcacaagtgtcgctgttgtcaaagttgcaacgaataaagaactaacttttaaaaatttacctttcatctaaaaacctccaaaaaaattatttacaagttaaatataacactaaaaatttttaagtcaataagaatatataaataaattaaaaagtttttgtaaagattagagtttacaaaaacattaagaggattaaaattgaattgtattacactttattagattgtgttaaattggtaaggtcgtcaattgtttgcatttatctaaaagaataaataagaaaggaattgagagcgaagagaaagtatttgtttataataataaatagtaacgtttgaataataattgtttggtcaaaggtagattaatatgaatgctgatatattatttgagtgcttaagtttcgaagaacaattatcagttagcatattaaaagcttttgatagaatcattttgagtgaggtgtttaaaggagaggaatataactcggtagtatttacagtctctttagagtattatttaaaacatatagaatataaaaaactgaacgtactatgaatttcgttcacgacgtccagttcaacatatcatttttatttagtatttaaatatttagcaagtctcttcataccttcttttaaaacatccatttcataagcataggaaatcctcacaaatcctttaccgaattctgtaaaggatgagcctggaacgattgctaaatgtgttgattcaagtaaatcgacacaaaattcgaaatcgtcatcggtgatatgtttaatacttgggaaaatataaaacgcgccttcaggttgagcggtaatctcaaaccctaatttagttaattcagatactaaataatttcttcgttctacataagcttcattcatatatttaggagcttctaatccttcgttaagtgctgttatacatgctatttgagctggaacattggcacaaatacaattataggcgtgcataaatgttaatttatcaatcaaatattgaggtcctaatagaaaaccaattcttattcctgttgctgagtgtgatttacttaaaccaccaattaatattaattgatcacgaatgtcttcaaattcagcgaaggatacatgtttaccactaaatgtattttcagcataaatctcatcgctaataataaatatcggatatttttttaatacatttacgatatttaaaacttcatttctttttaaaactacgccagttggattagtcggataatttaacaagacagcttttgtctttggagaaatatgactttctaacgcatcaggtgtaattttgaattgtgttgctgttgtatcaatataaattggtttaccacctagtacttcgataagtggtatgtagcctgcataaattggtcccggtattataatttcatctccaggctctatgatagaacgtaacgttgtgtctattgcttcacttgctccatttgtcacaataatttcttcaggatcataggaaaaatgataacgatttttgaagtattgactaattgcttcgcgagtttctaataagcctttattgtgagagtatgatgtcttgtcattgttaatagcatttatatatgcctttttcacaacatcaggcatagggaagtctggttggccaatagttaaattaacacaatcatccaaattattcatacgatttgaaaattggcgaatacttggtgctcttaaatatttagaattagaatttaaagaaagtttcatttgtgacacctcaaatataaatcaaatattgtctaaaaatttagaaattaataatatcataacatacttttaaagcaaaaaagggtaaattacttaagctttatttgaaaaatgaaaaatgtctaaatacactgtagtaactacttttcaaaatgaatgaagtggttacagttaatgtacttagacattatataattatgagtctttaaactgtgatggtctttgtaaattaattattggatttgtccatttacaaacaaagtttgtagataatacatatacgatgattacagatatacttattaaataaagatacgtcattaatgatataggattatcgaatgggtaccattcaaatcctctaacaatgccaataattaaaccatgtaataaatatacgtatagtgtacgactaccaatataagtatataattttttctttgttgacattaaatttagaaacgcagtcattgcgattaatataattccatataatataagtcgtttaaaaggactgaatacactctgtccttcattttcaagtgaagtatatggtgaacttcctaataaccaatctgcattgataggatgaatcacgtaaatgataaaaaataaaataaacgtaatgatagatactggtattagttttttatttttaaaaatagccgtatgttttttggtgaaaatgtagcctaggtaaaatattgggaaaaatacgattgtccttgaaatgcttaagtagctatcgatgttatctgaaaaacctgctccaatagatataataattgaaactgatagtactttatatggattaaatcttctaactattactaaaatgacatgaaagaaaaatagcgtgatcaaaaaccataacgcaaatactgggttaaaaggatcaagttgtaattcgtcacttttacctgttaagaaataatatattgaaaagaatgcaaaaaatatcatataaggtactatcaaacgttttgaaattttttctaaatagtatggtttatcaatatttttcgcgaaataaccagatataaacaaaaatgttggcatatggaaactataaataactaggtataatgctgataaatatttatcgccactagtgtagggttgtaacatatgtccaaatacgactaataatattaaaattgctcttgcgttgtcaaaaaaataatctctctcttttaatgaagtcatattttatctcctttatgtccataagactcttactaatttattatattttgtattagttatgcaacaaatttgtctattgtgtcgaatagtattgtaaaaattataaaaaaagcatataatattataaataatatgtagtggagtagaacaacatgtataaacaacttgaaaaacttattacactgactaacaatgacttaaacttagtgaatagaagatttggacaacgcacggatatcacatctgaacagctagaacttctccgtattttatttaattacgatcgcttatcacagtatgatttgacgatgaagattagcagggaacaatctatagtttcaaggtggattaagaaattagttttgaaagggtacatcacaagtcaacaatctagcgaagatttaagatgtaaagaattaattttgactgatcaagcacgtacattgatttcacaaataaataatgcacgttgcgaattgattgaagcaagatgtcaatgtttatcggaagtcgaattagacaatttaaatcaattacttgataagttaaatcaacgacgcatatcgttgtaacacggcaatagcaaacacataatttagtgtcattgtgcacacaacaaaaattgaatcatgcattacaagcaaaagtagcggtgattgttaaaattgatggtaaacaatcaccgctatttttgcttgtgtatgtataaaaaaagggatcaaaggtcatcccccatgattgatagtgggggatgacttttgatcctatgttcatgttgcttatttatattgtgggatgtcgaagtatttgccgacttcgccaattttatcatagtagcctttgatgattttagcattgatgttagcccaatctacatctgtagcatattggtgtgttcctggatgtgcaggattccatctcattttgtaaagcgtattttgaccagctttaacatatgagttgccgatgaatttagcaccaccaacgattgcttttgatactgtgtcccaaccagcttgtttagcatatttaataccttcacgtaaaggatcgttatcatatgcagcaataccaaatacgttatggtatttcgtgtttgagttagttacaactttgttgttcactacatctgcaccttttgctaattgagaagtaccgttacctgtttctaatagggcatgtgagataagataaacttcattaatgccatacatttgagcagctttgttaaatgcagcaccttggttttctaatacacctttaccttttaagaattgattaattttatcaatagaaatattttgtggttggtctaagcgtaagaattgatattttaatgctggatcttgagctaaacgcttcgtatccattgcatgcttaacatcattaaagttagcatctgtccacttacctggtacacgttgtacttgtggtttatattgtaaaccagcttgtatttgagcaacttggtttaatgtcatacctgtttgattatacttaattaattctttagctaaatcagttgatttaatccatgctaatttaccgttagataatttaccatagtaccaagtttgtccattaatgacttgttctttaacaactgagaatggttgttcattaaatgcttttaatgagtatttagctgtatcagaatttggtgttacatagtaataaccattaccgtttttaattacataagtgtagttgtaatcttttgcagctgatgtatttggtttaacagcagttggtgcagttaaatcttttgcatttacccaaccagtgcggttattaatagttccgtataaataaacatctttgcctacagatacttgtttcgctgcattaaatgtaccttgtgcaatatggtcacctgttaaaatgacttgatttttagtaccccaaggaaccattgataagccattatttgatttattaacagtatatttttgtgttgttttaacttctttgcctaagttttgaacatttaagtctttaacattgaaccaacctaatggaatattatgacttgtattatttaataatacgtatgtttcattaccatgtgcacgttcttttgttacatagaacgtacggtctgcatattttgcgccgtttttcgctgttttttcataaacagaagcacgaataccagtgttgtttggtttaacttgcgcaattttgctaactgtttgagtcgtttgaggtttagtaacagcataagcttttacagctgtttttggttgtgctactgcttttttaggtgcagcaggtacagctaaatatgctttacttatccaaccagatttaccatttacagttccatataaatagatagatttatcaatttgttgttgcttagtcgctttaaaagtttggttacctgtaccagataccgcaccagcttcttgtttataagtaccccaaggtactgaatataatttagtgcctggttttactgtatatgtttgcattacatttacaggtgattttgcattgttataaataacgtcaccttgtttaacccaaccaattaaagttggactattgtaatctttaactaagtagaatttgtttccacctagacttgcctcttttgttacagcaaatgttttttgaacttctttcgttggcttaccagttttgtcataaactgtagtgaataagccattgtttttagcattaatttgagcaacaccgtttaatgatgaaactgttaatttattatttgttgtaggtgttgatggcttaggtgttggtgtaggcgtaggtttagcagtatcaactaaatatgctttacttacccaaccagatttaccattcacagagccatataaataaattgatttatcaatttgttgttgctttgaagccttaaatgtttgatttccagagccagacacgctaccagcaatttgtttagatgtaccccaaggtactgtataaagtttcgtaccaggtttgattgaatatgtttgatttacatttacaggtgatttagctgtgttgtaaaccacatcgccttctttaacccaaccaaatttattaccagaattgtaatcttgtacaagatagaatttttgattacctaatgtagctgttttagatacagcaaatgttttttgaacttcattagttgctttaccagttttgtcataaacagtagtatataaaccactattagtaggtttgatttgtgcgacaccattattagcagcaactgttaatttaccagttgatggttttgatggtgtagtaggggtagttgtagattgcgtaccccatggcgccactttacccatttttattaaatatttttcattaattaagtcatataattgatcataactataattatgacttcttaaatatccatgtggatcggcatggtccgtaccacctaaatatttacttacagcatagtgagtccatactgtaccatttccatcatactcagcactgtctggttttaaaccataatattgtaattgtgtagctgcatagtcagcatagttattcattgaacgtgcaaatgatgcatagtcgtgtgtgtgcacgatttcaacattgatgaatctagggttaccgactgcaccgacaccccaagataagtaatccgttggtgctgtttcgattatacgatccccatcaacaaatgcatgaacgaaagcattttgataattgtttttcatataactaatttcgccatttatcgtcgaacgatcattagctgtatcatgaactacgattccttcaggacgacctacaccgttacggtatgcgtatttagggaagtaagatgtataatcttcttcaatcttaggtgcttttaaattatttttacgaatgtaatcattaattgatgagtttacttgcggtttatattttggcaaactcgtttttggtgctgcagcggctgatcttggttgtgctgaagcactaaacgtagttacttttggtgtaacttcagttttagctttaggtgcaacaggtgttgcttttggtgctgcggctttatattgcgtttcaagagcagcaggtttagcagctgatttaattaattctggattaatttgattttctgaattatcatcttcatcatcaactaaactatatccagcacttgtaacattattgttcgttttaggtgctgttgtgttagttgtttttgtaacaggtttcgcattatttgatgtagttgattgagtcgcacgagtgtcaccatttacttgtgtagtatcaaccttttgatttacttgagcattgcctgttttattcgctgcttttggttggacaatagcagggtcttgatatacttgagtgccagaaatgttttgcgttggattttttacctcagcttttgcttgttcagtagttgctttaactttattactatctaaaacatttttattagtagtttgatcttgtgtcgtctcagctgcttgaacttgatgtgcagtgactgctgaacctactagcgttaatgcaaccattgatggtagtttgtaattaaattttttcgccattctatttattactcctaacatttattaattattaatctcattatagtacctgttttatacacctgtgcgtatttaaccaatttgtaatatactcttaatttatattttcactgtaaaaaaatgaaaaaaattttgaatctcaatggtgacgtgacaaatcaaatagaattgatgtcaatttaagaattggtttattacaaatgtttctataatagatacaactttttttaattaagcgaggtcaacttttttgtcatttcaatatgctcgatgccttcctcaagaaatatattacctctcattttaaaatttaaactttcatagaatgggattgcatgacattgggcattcatggtagctacgtaaaaaccttcatctttagctaatgattctacagcttgcataagcatttttcccatgccttgtccgcgatgtgattttatcacagccactcgttctattttgacagttgtttcattgataggacgtatacgagctgtggcaactggctgtccattatcatatccaatgaggtgaatagattcagattcatattgatcaatttcactttcctctgggacgccttgttcttctacaaacactttctttcttatataaaagcaatcttctaacatctctggatcaatcacttttgtaaacataaaattcctccatatcctaataaaatcatttacatttaatttactaataataacatagaataacgattgttattttccacaaaaataattagacataaaaaagttataaagatgattcacaggaatcatctttatagctagatagagtgtatttgttataatgcttcttttctaataattgctgtatattgccaaaagattcgcatttgagcaatattccaattattcattcccattgtaaacccagaaggtttaaatatattcacatctgtcacttctaaagctgctgcgactaaatattgtaatggaatactaagtgatttcattgtttcggtaataccattttcatcatatacccatgaaaatggtaactctgattcgaaaacatctacactattgaaaatttcaggtagggctaaaatataacatgcaccatctacaataggattctcgatactatttttgtaataaattaggagtgcttcatagttttctcgatgctcatgattgacgtaaaaaaattcacttctaaaatgagccatatcttggctatgaataatttgttgttctaacatattaaacatcccatttatatttgcaatcttttcgtatgtttttctactcatgtatgatactcctttcataaatagtaaatgttaatcgtcatataatattagtttacaacaccattttggttatttgaagcttgtggcgtttgttgagtgccactttgattttgatttaagttttgatctgtagcaggttgttgttgattattgacgctattgttgttattactgtcatcagtattattcgaagatttatctttatcagtggtatcgttttgttcttttcttaataaactactatctaaaggtgttaaaggtatgagagaaccataatgattaatgacacgttgatctaagaaatcatttttatcattaataggtgataattctaagtctttacgaagtaagtttgcatatttttgaatgctgtctacacttggatgataatagtaaataccatttaacatatcatctttaccttttaattgcgcagttttaatttcaacatcatttgttaagtacatttttgctaaagctttaatttcagagttagttaaattatgctttgcatttttacctacaatttgaatgacgttatcaagtttatcaatagaatcaacttcctgtgctttttggaataaaatcttaattaattccatttgacgttgtccacgtttcaagtctgaatcatgatgtctagttctagcaactgctaaagcctcatcaccatttaatttttggtacccttttttaattttaatcttaccagtatcatctgtgtttggctcatttaaatcatatggtacatcatagtatatgccaccaagttcatttacagcttctacaaaggccttcatattaacgcgtacatagtaatcaactggaacattcatcgttgcttcaacagagtccattgctgcaattggaccaccatatgcatgtgcatgggtaatcttatcgtaatagccgactttaggaatgtagctgattgtatcacgaggaatactaagcattcgaatttggtgtttagattgattaaaagtagttaaaatcatagcgtctgatctagagtgttcagcatcttggcctttttttcttcttccgtcattatcatcgatacctaagaagagaatagagataggttgttcttcaggattgactttattgtctcgtaaatttgattgacgattagcatttttactatcttgagaagattcaaatgcatcttgagacgttttaaaaagtaacgtagcgaagacaattggaacaacaataagaaccaatgctagaaggatcaaaaagtattttaaaaatttattcatgattgatgctcctatattaaatttttgttaaatcataatcataattttaaaatataattagttgaacgatatttatacaacttcattactaatacattatagccttaaattgtagtactttatagtaaaaaatacaaatgttatgtcaaagttccttgtaatttgaatgttttgttaaaatcaaaaagcattttaaaaaatataatgcgactttagtatgatgtcttaaaaaaattaaaggggtaatataaatttgagtgatttatacaatgtgataaggtataattaaatttgttgtaataagaacttatatgaagaaaatattactaagtattataacgtataagtgggtaacagataaaattgtaagtgatattataacgaagttaaggttattgttttaattatttaatttgaatacaatgagaggctattagcgaatgaaatttaataaagtgaaattggttatacatgcgtgcgtgcttttgttcatcattatctctataggattagtttttcatcgattacaaacgaaaacgaactctatagaacctatacataaggaaacaaaattatcggataatgcaaaatatttggttgatcgtaataaaggcaagggtgagccatcgaaattaaaggaagtatataatagtaaagatcctaagtataagaagattgacaagtatttacaaaattcattatttaatggttcagtagcggtatatgaaaatggcaaattgaaaatgagtaagggctatggttatcaagattttgaaaaaggaattaaaaatacaccaaatacgatgtttctaattggttcagctcaaaaattttcaacaggattactgttaaaacagttagaagaagaacataaaattaatattaatgattcagtaagcaaatatattccatggtttaaaacatctaagcctattcctttaaaagacttgatgctgcatcaaagtggattatataaatataaatcttcaaaagactataagaacttagatcaagcagtgagagcaattcaaaaacgtggcattgatcctaagaaatacaaaaagcatatgtataatgatggaaattatttagtgctagctaaagttatcgaagaagttaccggcaaatcatatgccgagaattactatactaaaataggtgatccattaaaacttcagcattcggcattttatgatgaaaaatcatttagaaaatattttgcaaaaggttattcttataatagtacaggactttctttcttgaagccaaatgttttagaacaatattatggtgcaggtaatatatacatgacaccaacagatatgggtaaattaattactcagatacaacaatataaattatttagtcctaaaataaccaatccattattacatgagtttggtacgaaacagtatccagatgaatatcgatatggtttctatgttaagccaacattgaatagacttaacgggggattctttggacaagtctttactgtttactataatgataagtatgtagttgtacttgcattaaatgtaaaaggaaacaatgaagttcgaatcaaacatatttataatgatattttaaaacaaaataaaccttataatacgaagggtgttattgttcaataattaatatagaagatataacttgtatatggcattaaggcattgaccttatttgactagtatacgagttatatcttcttttttatagaggtgaaaagtttaaaggataagattgaagtagtagggtgataaatttgcgttaagttaaaaaatatataaacaattgatgtgaatgtcaatataaaaatgtacataaatgattgtataagaatgtattaattgaatggataataatgattgtcttattagatatagaaggggaattaaccatttaaaaattgaaggataataaaaaccagctaacaaaagtgttagctggttaaactttacattattaaaatgttgtttataagtgtgaagagtgaccgccttgcataacccaatatgttccgacaacgaaacaaagtgtaattacaagagcaaagataactttgaatgtttgtaaacgtccatctttaccttcagttaaatgcatgaacattaataattgaagtcctgcttggacgaatgcaaagccaaagataattgtcaacttcgcgtggaatgttaatgacgtgtatagtgttacgtaaactgctaaaagcgttaatacgatagatgcgataaatcctacagtatgtttcattattgtactcatccgctatacaccatccctatcatatatacggcagtaaagatgaaaacccaaacaacatctaagaagtgccagtataaacttactataaataattttggcgcattatatttgtctaatccgcgtcgttggatttggattaataaacaaatggcccaaacgatacctagcgatacgtgacaaccatgcgttcctaataggataaagaaactagaccagtaagaaccaattgttgggttaacgccttctgatgcatagtgtgcgaattcataaatttcgaatccaacaaagactaaacctaaaagtaacgtaatgatcatccaaaacatcattaacttttgtttttcttggcgcatgtagtaaatagcaataccacatgtgtaagaactgaataataatgcaaacgtcattattaaaacaagaggcaattcaaataactcagtagtcattttacctgcataatcgccaccatgttgcaaagttaatagtgtcgcaaatagggtaccgaataacgcaaattcggctgtaatgaaaatccaaaagccaagcttatttaattcgccttcatgtgtgcgtgaatcaatagtgtttgtatcatgactcatgacttacagcctccctttctttaatacgcgcttctcttaatctagcttcagtttcagcaacttcagcagcagggatatgatatccgtgatcgatttggaaactgcgataaatcatagtaccaaaaataccgaataaacaaattaatgctggaattacagtttcgaaaattaagaagaaaccgccgatagtcataaagataccaatccagaatccaacaggagtattgtttggcatatgaatgtctttgtaattatggttgtctaaataatgacgaccatgttctttcatatcaacaaatgtgtcgtagtcattccaatctggtgtaatggcaaagttgtatttaggtggaattgctgatgcagtagtccactctagagtacgaccaaggccatcccagttatctccagttgcttcacgtggagatttgaagtgactgtatacgatactaacaacaaggaataagaatccgattgccattaataatgcaccgatagttgaaattaagtttaataagaaccaaccatctgatggcatataagtgtataaacgacgtggcataccatctaatccaagaatgaattgtggtaagaaacaaacgttaaatccgatcatgaagaaccagaagcaccatttgtttaatgtttcgtttaatttgtaacccatcatctttggataccagaagattaaaccagctaagcaggcaaatacaacaccagtaaccaatgtatagtggaagtgagctactaagaagtacgtattgtgatattgatagtcagcagatgccattgctaacattacacccgtaacaccacctaaaaggaagttagggataaatgctaatgagaataacattggtgactcaaatgtaatacgtcctttatataatgttaataaccagttaaacaatttcacaccagttggaataccaatcagcattgttgaaattgagaagaatgagttgattaacgcaccattacccattgtgaagaaatggtgaacccaaactaagaaactaaggaacgcgataccggcagttgcccataccatactttgatgtccgaataaacgcttacgagcgaatgtcggaataatttctgagtaaataccaaatgctggaaggataacgatataaacttcagggtgcccccatacccagaagaagttagcccaaagcattggcataccaccatgtgcaactgtgaagaatgctgtgtcaaatattctatcagttgtcattaatgctaacgctactgttaaaggagggaaagcaagaataacaattaatgttgtaataaatgttgttactgtaaacattggcatttgcataaacttcatagttggtgttttacatcttaaaattgttacaaagaagttgatacctgtagctaaggtaccaagccctgaaatttgtatagctattaagtaatagttaacacccggaccaggactgaattcacctgctagtggcgcatagtttgtccaaccagctgctggtgaaccaccaataataaatgacaggttgaataaaatcatacctgcaaagaatagccagaaacttacgttgtttaatactgggaatgcaacatcacgtgctccaatttgtaatggaacaacgatattccataaaccaaagataaatggcattgccatgaagataatcatgattacaccatgtgtactaaaaatttcgttatagtggttagattctaaaaatttgttatcaggtactgttaattgcgcacgaataagtaacgcatcaataccaccacggacgaacattaatacggcacagattaaatacataataccgattttcttatggtctacagatgtgaaccattctttgtaaagatatttccataatttaaagtaagtaattactgcgattaaaccaataactaagaatggggcaccaatttgtgccattgtaatcatccagttacctttaactagtaattgatcccatggaaaattcattaatgtccacctccatgatcatcattgtcttgatcttgcgcatcttttgaaattttcttcatttctttcgcatttttcgattcatctttcttgaactcattgttatatggttcgtcatttccaagaatcatcaatttcataccatgtcgtttatagttcgcatttgtaatttgagctttacgagcaggtattaatggtttgtctgatacatctttaaacatattttcttcactagtgaagtttggatctttcaattcgaaattgaaacgtttatatgcatagaagatgtattctggatcggctgctggatcaacaaacgccatatgtgtaccattaaattctaaagctttattaggtgtgcttggtaataattgtttatcaaatgtatcttgatctaacgttttcttacctttaacttctttcacccatttgtcgtagtctttttgactaacggcatttactttaaatgtttgacgcgagaatccttcaccattgaagttagagttacgacctctgaacgtaccagtttgagatgcttctaacgtccaattcattgtcatgccagtcatggcatatttttgaccacctaattgtggaatccagaaacttgtcattgtatccatagcttgaagcttaaatacaacaggacgatctttagggattgttaatgtattaacagtctctatatgttcatctggataagcaaagaaccatttgtatcctgcacttactgcatatacaaccattggatctttctcactcttcggtggtttttcgtaatcgtataaagttttaactgtaggaatagctaaagcagcaacgattatgataggtattacaaaccatattgtttcaatgatggcattatggtgcatcttaccagattcggcattcttattataactatacttgtaaataaaaatggcgaacatgccaagtacaacgaaacaaataacaagcatgaagacgattgaataaagaatcaagaacttctgactacttgctactggcccttttgcgttgaaaatttctatatttgaacaaccactaagtaaaattagtgtgccaaataatagaagcaaagacttaaattttgacacttttttgacctcctaatactacaaatgtagggcttaacattaattttaagttattacacaatatttacaagggcttatgggaaaaaaattaataaaattgtatcaaaaatgttgataaatcaaggtatgacgtgggttcacacatttgttaaaattatgtgtacattttgtgactaatagcgtttttgaaaaaattgcttcatatttaaaaggaaagttgagaatagctttcaattaaaggttaattgaatgaaaataaaaaaagtttgaaattgtctaataaattgaaaatgatggctagttcattgaaaggaagcgcaaacattttaatgaggaatttgccaaaagtaatttatcattaaacaatgaaaagtggaaatttgtttgttcaaaatcaaaacattcttttaaaaagagcagttaagttttaataatttgataggtagtcctttggtatacagaaaaattacaatatttgggttaaagttgcagatgaagttggaataacaaataaaatggtagcaaaacatgtacgtttgctaccattttatttgcagtatagtgatgagggctatttaacctcaatatacctagtggaaattttaattgcaccatctgaatcagtgacatgatatttaatttgatatttaccagatttagatgtatcaatttggccatcgactttaattttatcggttaaatctccatcttctttatcaaatgcacttatgccgtttagaaggttataatcttgacctttcttaataacgatatcattagcgcctttaatttgtggtgtagtattcgtcgttgcatctgcatttaaatttggtgttactagtgtagcagaaacaccgagggctgataatgactgtaatagtttattcataatgtaacctccgaatgataagtcatttctgagttagctttactataccttaatttatattatttacacatcatactatagtcctaatattaccctataaagaatgaaatttaaatataaatttataaataatgaggaaataattattattttgaaaatctgccacaattgtaaaattaataattcagggataatttgaaatcaaatataactttattcgacagtttgaacttaaattgttgtgcatcataacaataagaaaagggaggcaaaaatgataaagaaccactaataatatattatgtagtagtattttatcattagtcacagcttctgtgttggggcccacacccaacttgcattgcctgtagaatttcttttcgaaattctctttgttggggcccctgactataattggaaaatgcttgttacaagcttattttcattcaattaactactgtctatataaaattgttgagcctagatcaatgtgaaatgctcccttcaaagttttcatttattcaatgtctactttgaagggagcatttgatcgattaatgtcccagatttttcttgttattcattgcaattgcaaaataatatttaatttgggttaaaagagttcattaaaactcagttattagggagtgggacagaaatgatattttcgtaaaatttatttcgtcgtcccacctcggcaaggttgactagaattgaaaaaagcttgttacaagcgaattttcgttcagtcaactactgccattataactttgtagagcatagaacattgatttatgtctcaggctctttacgaatcaatacctcgacgcattttttctgcaagcaaagtattatttaataccatagtaattgttaatggaccaacgccaccaggaactggtgtaatagctccagcaatttctttaaccgcatcataatcaacgtcaccttttaatttgccattttcatctggcgtattgccaacatctataattactgctccttctttgacaacatcttttgttactaaaccaggcttaccaactgcactgacaatgacatcagcatcttttaaatatgatgccatatcctttgaacgagaatgtaagattgttactgatgcatttttttgaagtagtaacttagaaactggttgtccgacaatatggcttcgtccgattacaactgcatttttaccttctaaatcaatatcagcatgttttaatatttccatgatgccgagcggtgtgcaaggtacaaaagtttgttcgtcgatatataatttccctatatttattggatggaaaccgtccacatctttatcaggattgattgcttctaatattttctgttcgctaacttgttttggtagtggtacttgtaccaaaataccacttacagaatcatcattatttagtctgtttagttcgtttaatacttcttcttcagtagctgtttcttccaaatgtacgatttctgaaatcataccaattttttcagctgctttcttttttgatctaacataactttgactagcgccatcattaccaactaatataacggataatttaggtgtaaaacccttttcttttagcgcttcaacttgattttgtaacccctgtctgtagtctttggcaatttgtttaccatctaaaattttagcaaccataaaaacttctcctcctattgtcaatatcctaactttgttagtttataaaactaatttacatagcaaaagacgtaaattcaaacaaaaaatcaaaataaagttcgatttttgattgaaaaagcagaaattgcttgttatgctatatctataatatacaactaaagtaattcacaattcaaacttttgaaagggtgtacaaagtgaaagtagcagtcattatgggcagttcttccgattggaaaattatgcaagagagttgtaacatgttggattattttgaaattccgtacgaaaaacaagtagtatccgcacatcgtacgccaaaaatgatggttcaatttgcttctgaagcgagagaaagaggtatagacattatcattgcaggcgctggcggtgcggcacatttaccaggtatggttgcatcattaacgacgctaccagttattggagtgccgattgaaacaaaaagtttaaagggtatagattctttattatctattgttcaaatgccaggaggtattccggttgcaacgactgcaattggtgcagcaggtgctaaaaatgcaggtatacttgcaacaagaatgttgagtattcaaaatccttctttagttgaaaaactaaatcagtatgaatcttcgttaattcaaaaagtggaggacatgcaaaatgaacttcaataaattaaagtttggtgcgactattggcattattggtggtggtcagcttggaaagatgatggcacaatcagctcaaaaaatgggttataaagtggttgtattggatcctgctgaagattgtccatgtagatacgttgcacacgaatttatacaagccaagtatgacgatgaaaaggcactcaatcaattaggacaaaaatgtgatgtgattacttatgaatttgaaaacatttcagcccaacaattaaaactattatgtgaaaagtacaatattccgcaaggttaccaagctatacagttattacaagaccgcttaactgaaaaagaaacattaaaaagtgctggtaccaaggttgtcccattcatttcagtaaaagaatctacagatattgacaaagcaattgaaacattaggatatccttttattgtaaaaactagatttggtggctacgatggcaaaggtcaagttttaattaacaacgaaaaagacttacaagaaggttttaaattaattgaaactagtgaatgcgtagctgaaaaatatttgaatatcaagaaagaagtatcacttactgttacaagaggaaacaacaatcaaatcacttatttcccattacaagaaaatgagcatagaaatcaaatacttttcaaaacaattgttccagcgagaatagataaaacagctgaggcgaaagagcaagtaaataaaattatccaatcgattcatttcattggaacatttacagttgaattttttatagatagtaacaaccaattgtatgtgaacgagattgcaccaaggcctcacaattccggacattattcaattgaagcatgtgattattcacaatttgatactcatattttagcagttaccggacaatcattaccaaattcaattgaattattaaagcctgcagtcatgatgaacttactaggtaaagacttagatttattggaaaatgaatttaatgaacatccagagtggcacttacatatttatggtaagtctgagcgtaaagatagcagaaaaatggggcatatgactgtactaacgaatgatgtaaaccaaactgaacaagatatgtacgctaaatttgaggggagtaattaaagcatgacattactatatgaaggaaaagcgaagcgcattttctcaacaaatcaagaaaatgaattaagagttgaatataaagatgaagttactgctggaaacggggctaagaaagacacaatggcaggtaaggggcgattaaataatcaaattacttctattatatttaaatatttacaagaaaatggaatagaaagtcactttattaagcaattatctgaaacagaacaattagttaagcctgtgaaaataattccattagaagtagttgttcgtaatattgctagcggatctattacaaagcgtttaggttttgaaaatggtgaagtttttagagaaccacttgtggaatttttctataaaaatgatgctttaaatgatcctttgattacagatgatcacgtcaaattactgaatattgcgactgataaagatattgaaacattaaaaacgaaagcgctagaaattaatcaagtattaaaacaattaatggatgcgatgaatttaaaattagtagattttaaaatcgaatttggaaagactgagactggtcaaattttgttagcggatgaaatatctccagatacatgtcgaatttgggataaagctaccaatgcaaactttgataaagatgtatatagaaataacactggatcactgattgaaacatatcaaatatttttaaacaaattggaggatttaaaataatgaaaacaattgaactacatatcacattacaaccacaagtattagatacgcaaggacaaacgcttactcgagctgtacatgacttaggttatgcacaagtgaatgatattcgtgtaggaaaagtattatatatgacagtggatgaggttagtgatgaaaaggtacacaacattattacaactctaagtgaaaaattgtttgcaaatacagtgattgaagaatatagctataaagttttagaagatgaaaaggagaatgcataaaatgaaatttgcggttcttgtttttccaggttcgaattgtgatagagatatgtttaatgctgctattaaaagtggtgttgaagcggaatatgtagattatagagaaacatcactaagtggatttgatggcgtacttattcctggtggattttcattcggggattacttaagatctggggcaatggctagtgtagcgccgattatttctgaagttaaacgtcttgcagctgaaggtaagccagtattaggtgtttgtaatgggtttcaaattttaactgaaataggcttattacctggtgcattattgcataacgattcacatttatttattagtagaaatgaagagttagaaatagtgaataatcaaacggcttttacaaatctttatgaacaaggtgaaaaagttatatatcctgtagctcacggcgaaggtcattattattgtactgatgaaatatatcaacaattaaaagctaacaatcaaattattctgaaatatgtgaataatccgaacggttcatatgatgatattgcaggaattgttaacgaaaaaggcaatgtatgtggcatgatgccacatcctgaaagagctttagaaacgttgttaggtactgatagtggtgtgaaattatttgaagctatggtaaaaagttggagggaacaacatgtctaaatttatcgaaccaagcgttgaagaaattaaacttgaaaaagtatatcaagatatgggattaagtgatcaagaatatgaaaaagtttgcgatattttaggcagacaacctaactttacagaaacaggtatcttttctgttatgtggagtgaacattgctcttataaacattctaaaccgtttttaaagcaatttcctacgtcaggtgagcatgtgcttatgggtccaggtgaaggtgcaggggtagtcgatatcggtgataatcaagccgtagtatttaaagtagagtctcacaatcatccatctgcaattgagccatatcaaggtgctgctacaggcgttggtggaatcattcgtgacattgtctctattggggctagacctattaatttgttaaacagtcttagatttggagaattagataataaacaaaaccaaagattacttaaaggtgttgtaaagggtatcggaggttatggtaactgcattggtattccaacaactgctggagaaatcgaatttgatgaacgttatgatggtaatccacttgttaatgcaatgtgtgttggtgttatcaatcacgacatgattcaaaaaggcacagcaaaaggtgtaggtaattcggtcatttatgttggtttgaaaactggtcgagatggtattcatggtgctacttttgcatctgaagaattgacggaagaaagcgaaagtaaacgaccttctgtacaaatcggtgatccatttgtaggtaaaaaattaatggaagcaacacttgaagcaattacatttgatgaattagttggtattcaagatatgggtgctgctggtttaacatcttcatcttctgaaatggcggcaaaaggtggtagtggtttacatttgagattagaacaagtgccaacacgtgagccaggtatttctccttacgaaatgatgctttcagaaactcaagaacgtatgttactagttgttgaaaaaggtactgaacaaaaattcttagatttatttgataagcacgaattggatagtgctgttataggtgaagtaacagatacaaatcgttttgttttaacatatgaagacgaagtttatgctgacattccagttgaaccactagctgatgaagcacctgtatatattttagaaggagaagaaaaaaattataatacttctaaaaatgattatacacacatcgatgttaaagatactttctttaaattacttaagcatccgactatagcatctaaacactatttatatgatcaatacgatcaacaagttggtgccaatacgataattaagccaggacttcaagcatcggtagtacgtgtggaaggcacaaataaggcaattgcttcaacaattgatggtgaagcgcgttatgtatataacaatccatatgaaggtggaaagatggtagtagctgaagcttatcgtaatttaattgccgtgggtgcaacaccattagcaatgactgactgcttaaattatggttctcctgaaaagaaagaaatttatcaacaattagcagattcaacgaaaggtatggcagaagcttgcgacatacttaagacacctgttgtttctggaaacgtttctttatacaacgaaacgaaaggcacttctattttccctacaccaattgttggtatggtaggtctgattgaaaacgtagactatttaaatgattttcaacctcaagttggagataagttatatgtaattggtgatactaaggacgactttggtggtagtcaacttgaaaaattgatttatggcaaagtaaatcacgaatttgaatctatagatttgagttcagaagttaaaaaaggtgaatcaatcaagaccgctattcgtcaaggggtattatcacatgttcaaacggttggtaaaggtggcttactgattaccttagctaaactaagtgcgcattacggtttaggattaaagtctttaatagatataacaaatgcacaattgtttagtgagacacaaggccgatatgttgtttctgttaaatcaggtaaaactttaaatattgataatgcaatagaaattggtcttttaacagatagtgataatttcaaagtaacaacaccatatacagagattagtgaaaatgtttcagatattaaacaaatatgggaaggggcaattgctcaatgtttaactactcaggattaaacgaagaatgtggcgtgtttggtatttggaatcatcctgaagcagcgcaactaacatatatgggacttcatagtttgcaacatcgtggtcaagaaggtgcaggtatagttgtttctgatcaaaatgaattaaaaggcgagcgaggattaggcttactaactgaagcgattaaagatgaccaaatggaacgattaaaaggatatcaacatgcaattggtcacgtccgttatgctacttcaggtaataaaggtattgaaaatattcaaccgtttctgtatcacttttatgatatgagtgtaggtatttgtcataatggtaacctcattaatgctaaatcattacgtcaaaatttagaaaaacaaggtgctatcttccattcgtcttcagatacagaagttattatgcatttgattcgacgcagtaaggcgccaacttttgaagaagcattaaaagaaagtcttcgaaaaattaaaggtggttttacatttgcaattttaacaaaggatgcgttatatggcgcagtagatccaaatgctatcagaccacttgttgtaggtaaaatgaaagatgggacatacatccttgcaagtgaaacatgtgcaattgatgtgttaggtgcagaattcgttcaagatattcatgcgggtgaatatgtcgtgattaatgataaaggtattacagttaaatcttatacacatcatacgacaactgcaatttctgcgatggaatatatttattttgcgagaccagattcaacgattgctggtaaaaatgttcatgcagtgcgtaaggcttcaggtaaaatgttagcacaagaaagtccggtaaaagctgatatggtcatcggtgtacctaattcatcattatctgcagcgagcggttatgctgaagaaatcggtttgccatatgaaatgggactagttaaaaatcaatatgttgcaagaacatttattcaaccaacgcaagagttacgtgaacaaggtgtaagagttaagctatctgcagtgaaagatattgtagacggtaaaaatattattcttgttgatgattccattgttcgaggtacgacaattcgacgtattgtgaaaatgttaaaagattctggtgcaaataaagtgcatgtgcgtatagcatcaccggaatttatgttcccaagtttttatggaatcgatgtttcaactacggcagaattaatttctgcaagcaaatcacctgaagaaattaaagattatattggcgctgattcgttagcatatctatctgtagatgggttaattgaatcaattggtttagattatgacgcgccttatagtggcttatgtgtagaaagtttcactggagattatcctgcagggttatatgattatgaagcaaattataaagcacatttaagtcatcgacaaaagcaatatatttctaaaaacaaacacttttttgatagcgagggaaatttaaatgtctaaagcatatgaacaatctggtgtaaatattcatgctggttatgaagctgtagaaagaatgtctagtcatgttaaacgtacgatgcgtaaagaagttatcggtggtttaggaggattcggtgctacatttgatttatcacaattaaatatgacagcgccagttttagtttctggaacagacggagtaggtacgaaattaaaactagctatcgattatggtaaacatgattcgataggaatcgatgcagttgcaatgtgtgttaatgatattttaacgacgggtgcagaaccattatattttttagattacatcgctacaaataaagttgttcctgaagttattgaacaaattgttaaaggtattagtgatgcatgtgttgaaacgaatactgcacttatcggtggagagactgctgaaatgggtgaaatgtatcacgaaggcgaatatgatgtagctggatttgctgttggagcagttgaaaaggatgactatgtagatggttcagaagtgaaagagggacaagttgttatagggcttgcgtcaagtggcattcattcaaatggatacagtttagtgcgcaaattaattaatgaatcaggcattgatttggcatcaaactttgataatcgtccatttatagatgtctttttagaaccaactaaattatatgttaaacctgtacttgctttgaaaaaagaagtttctattaaggcaatgaatcatattactggtggaggtttttatgaaaatattccacgtgcattgccagccggatatgctgctagaattgatactacatcatttccaacgccaaaaatatttgattggttacaacaacaaggcaatatagagacaaatgaaatgtataacatttttaacatgggtattggctatacggttatcgttgatgaaaaagatgtatcacgcgctttgaagattttagcagaacaaaatgtggaagcctatcaaattggtcatattgtgaaaaatgagtcaactgcaattgaattgttgggggtataacaatggttaaaattgcgatttttgcatcaggttcaggaagtaactttgaaaatatagttgagcatgttgaatcaggaaaacttgaaaatattgaagttacggcgctatatacggatcatcaaaatgcgttttgtatagatagagcaaaaaagcacgatattcctgtttatattaatgaaccaaaacaatttgattcaaaagcagcatatgaacaacatttagtaacattattaaatgaagataaggtagagtggattattttagctggctacatgcgtctaattggtccagacttattagattcatttgaaggtaaaatattgaatatacatccatctctattgccgaaatataaggggattgacgcaataggccaagcatatcatagtggcgatactattactggttcgacagtacattatgttgatagtggtatggatacgggagaaattattgaacagagacaatgtgatattagaccggacgattcaaaagaacaattagaagagaaagtaaaaaaattggaatatgagttatatccaagtgttattgctaaaattgtaaaataaggagtatgtatgtgatgaagaaagctattttgagcgtatcaaataaaacaggtattgtagagtttgctaaagcgttaacgcaattaaattatgaattatattcaacaggtggtactaaacgtatattagatgaagcaaatgtaccagttcgttctgtttcagacttaacacattttccagaaataatggatggccgtgttaaaacattacatccggctgttcatggtggcattttagctgatcgaaataaaccgcaacatttaaatgaattatcagaacaacatatagatttaattgatatggtagtagttaatttatatccattccaacaaactgttgcaaaccctgatgtgacgatggacgaagcaattgaaaatattgatattggtggtccaacaatgttacgtgctgcagctaaaaactataaacatgtaacaacaattgtacatccggcagattatcatgaagtattgacgcgattaagaaacgattcgttagatgagtcatatagacaatcattaatgattaaagtttttgagcatactgcagaatatgatgaagcgattgtacgtttctttaaaggggataaagaaactttaagatatggagaaaatccacaacaatcagcgtattttgtgagaacttcgaatgctaagcacacgattgcaggcgctaaacaattacatgggaaacaattaagctataacaatattaaagatgcagatgctacactagctttagttaaaaagtttgatacacctgctgcagttgcggttaaacacatgaatccatgtggtgttggtatcggtgacacgatagaacaagcatttcaacatgcgtatgaagcggatagtcaatcaatatttggtggaattgttgcattaaaccgagctgtaacacctgagttagcagagcaattgcatagtatctttttggaagtcattattgcaccaaaatttacagatgaagcattaaatattttaaaacaaaagaagaatgtaagattattagaaattgatatgactatagacagtaacgaagaagagtttgtttcagtatctggaggatatttagttcaagataaagacaattatgtcgtgccaaaagaagaaatgaaagttgttacagaagttgcacctactgatgaacaatgggaagcaatgttattaggatggaaagttgtaccatcagtaaaaagtaatgcaattattttaagtaataataaacaaactgtaggaataggtgctggacaaatgaatcgtgtcggtgctgctaaaattgcattagaaagagctattgaaatcaatgatcatgtggcgttagtatctgatggatttttccctatgggagatacagttgaacttgcagcacaacatggtataaaggcaattatccaaccgggtggttcgattaaagatcaagattcaattgatatggctaataaacatggtattgcaatggtagtcacaggcactcgacattttaaacactaattttaaaggggcgtaacataaatgaatgtattagtaattggtgctggtggacgagaacatgcacttgcatataaacttaatcaatcgaatctagttaaacaagtgtttgtcattccaggtaatgaggcaatgacacctatagctgaagtacacactgaaatttcagaatctgatcatcaagggatactagattttgctaaacagcaaaatgttgattgggtagttataggtccagaacaaccgctaattgatggattagcagacattttacgagcgaatggtttcaaagtgtttggtccaaataagcaagcagctcaaatcgaaggctcaaagttatttgctaaaaagataatggaaaaatataatattccaactgctgattataaggaagtagagcgaaaaaaggatgcattaacatatattgaaaactgtgaattccctgttgttgtcaagaaagatgggttagctgctgggaaaggcgttattattgcagatactattgaagcagccagaagtgctattgagattatgtatggtgatgaagaagaaggtactgttgtgttcgaaacgtttttagaaggtgaagagttctcgctaatgacatttgttaatagtgaattagcagttcctttcgactgtattgcacaagatcataaacgcgcatttgatcatgatgaaggaccaaatactggtggtatgggggcttattgtccagtaccacatattagtgacgatgttttaaaacttacaaatgaaacaattgcacaacccattgcaaaggcaatgcttaatgaaggttatcaattcttcggtgtattatacattggtgctattctaactaaagatggtccaaaagtaattgaatttaatgcccgttttggtgatcctgaagctcaagtattattaagtcgcatggaaagtgatttaatgcagcatattattgatttagatgatggaaaacgtactgaattcaaatggaaaaatgaatctattgtaggggtcatgttggcatcaaaaggatatcctgatgcatatgaaaaagggcataaagtaagtggctttgatttaaatgaaaactattttgttagtggattaaagaagcaaggtgatacctttgttacttcaggtggtagagttatacttgccatcggaaaaggtgacaatgtacaagatgcacagcgagacgcatacgaaaaagtatctcaaatacaaagtgaccatttattctatcgttatgacattgcgaataaagcactacaacttaaataagtatatttaaaaatactaagattagctatgaacgaatctataactatagattttttcatagcttttttagttgtagagtctaggacattgatttctgtaccaaatttgtgattatgcatatgtaatacaaaagaggcgccacaacatgtttggatgaacaaaataacatgtttgtggcacctcttttgtttagtatggaataaatggttttctttttctatacaatgaatttctaatttagtatctatacaattatggataaaatttaacctacacgaccaagacgaacatcatctatgcccgtgatgggtaaggtgattgaacaataatatgccaaagtaataatggcaattaaaacaataataaagattacatctttatatgagaaaggtacgttgtaatagtaagtacgaggaccatctctaaatcctttcgactccatcgcaactgataattgatgagcctttctaatgttttggcttaatagaggtatgattaaatgcttaaatcgctttaatcctctataatttgctgcgtctatcatttgatagcgcatttttaaagatctgcgaagttgtattaaagaactaatcattaaaggtatcatacgaatggcagccatgaatgcataagcaacttttgatttaacctttaaatgttgcattaaactataaaaaatcatgacaacctgagatgtgagtgcgattaagataccgaaaaatgaaatagcaatggttcttaatgatacatgtaaaccacgaactaaactttctgttgtaatatggataaatccgaatttcaaaattgtatggctaccattcccgtataaaatcatgaacagggaagagagtaatgcaaagccaatacttatagttataaaaattgctgtaattttaaactgagtaccattaaacatcaataagaaaactaacattaagatagtgatataaaacataaaatcgaaattatgcacaaatataataaagaaaaatagtataattccaagaaatagtttcgttataatgttgacatcatcaacaaatgattgccgaactttccattgctcatacattcgtatcaccatcacaatctagtaacgcaccatctgaaattttaagtcttcttgatgggtaacgttcaattatttcatcgtcatgcgtaaccatgacaatactttggcccaaattaattcgtttttggaaaagtttgatcaactggaatgtgttatggctatcaagtccaaatgtcggttcatctaaaaagatgatatcagctttagaacttagtgcggtagctacgctaaggcgtcgtttttgaccaatagacaactcataaggatgttgatcttttacattttctaaatctaaaagttttaaaagttgtatcgtttcatcatcactttgatctttagaaaggtgattaaaatgaatgttaatttcatcataaaccgaatttgttataaattgtaattctgggttttgataaactagatacatgtgttttgctgcatgtttaatttttgttaaacgctgattttcaaaataaacatcaccttgatatttaatcaattgcataattgattcaagcaaggttgttttaccactaccatttgcccctgtaattgtaatccactcacctagaccaatttctaaatctgagaatgagagcaacgttgatttaccgcgaataatacgtccatttttaaattgtaataagtgtgagtttgttgttggaaagtcaacacgacttggtgcgaattcccatgcacgtggatgccacacaccatattcactgagtaaatgaacatacttctgtaatatgatttcaggacactcatcggcaatgatatttccgttataatccatcaaaatgacgcggtcgacatgattccagatgtgtttaactttatgttcaacgattacaacagtttgatcttcccaaagttcaattagtttagtccataaatcttccgttgcttgaacatctaacattgctgtcggttcatctaaaaacaatgtttttgattgttgaagaatggtttcaacaattgccaatttctgtttcatcccgccacttaaatctttgatatacgtttcaggggtaacatttaaattgaccatatttaaagcattgataattaacgcatccatgtcttcacgtggtacttgtctattttctaaaacgaatgcaagttcttcgtatacttttggcatacaaaactggctatcagggtcttggaaaataacgccacttaatgggtcaacgattagttcatcatatttcataggtaattcaattaaattaggaacaataccacttaatacattcagaagtgtacttttaccgcaaccagaaggaccgagtaaaagtactttttctttgtcttgaatagtgatatttaaatgatcgaaaattttacgctgaccacttggatattttaatcgtaaatcacttacttttaacactctgaatgctcctcttataagttgtcgtaatcttctttagcagctggtctaaataattttgttacgcctgtcttatctaaagcttttactaaaaggtaagataggacgccggcgactactgcaccactaattaatctaaatacgatgaataatgttaagttccaacctgcaacttcatttaaataaccatagaaataatcgatcgggaaagccgcgatagctgtacaaaaacctgctaacatagctaccataactgaacgagattgatatttaaaaattgcaaagacaagttcacacgctaaaccttgtatgaaagcgtaaacgattgtcggaatatcgaaacgacccataatgatagtttcgccggcacctgcagcaaattcagccaataaagcaatacctggttttggaataattagatagcagacaatcgctgccatgaaccaaaccccgtttgttaattgttcgaggtgaaggcctgtagcttgcacaccattgtaaacaaaccaccataaattgtaaataactgcgaatactactgaaataagtacggttactagaatttcagatagctttaaaccttttgacatttttacatcctcctaataaaaaaacgcacaaccatccataggaaagttatgcgttcacaatatatattagtaaaacatatgtatagtaacactttcctacgctagttcaagctagatcaggttcaaagggtttgagggcaagcctcatctcagtataaaacacccctagtgtgtgcgatttatttaattaattatactgtaagacgtttataaacttatgtcaataggttgtcttcatgaaatttcgtttaattcgatttaaaatttataatattagcattagatttaaattaaagatgtagtagaaatgttagtaattaaagatataaaaatatgtgacatgtaataatattaagttgataagtgaagagggatacttatcaatcatacctctttaacaacagtgaacaacccgtgcataatggcttacgaattattgtttgtaaggtaaaagagggatacttgcgccgagcgcatgaataaaatcccctaacaacgaaaagttgtaaggggatttaaattaatttagtgtatcttggatatcttgttttgtttgattaatatcttctgttttttcttcttttttatcttttagtttttcttcaacttctttagctttttctgctgcttttttattttgattttcatttgacatgattaattcctcccaaattggataattatttatatataaatcttacccggttgtactttcgttaaacttttctaagtctatagcactatttattcatttatctaaagacaacaacattagattaatatataatgagtttgaggtgaacataatgtcttttcttaggaaacacgccgaaattatttttagctatttaatcggtatcgtttcactcttcactggtctcattattttaattaacttgcctttaattaaacaattaaatggtggtaaaaaagttgatacacatgttcataatgtgtgggaatttctgaatgcatttttcagtgaaattattaaagtaatgagtcgatttataggtaatttccctatagttagtgcaattgtgataattatattcggtattttagttatgttgattggtcatacattacttagaactattaagtatgactatgatatttctatctttttcttagttatcggtatcatgtactttattattacgcttatattaatgacgcaagtatatggattctttgcggtaattttcatcattccatttacaattcatattggatatatcgtttataaagatgaattgaatcaggaaaatgttaaaaatcattacatgtggattattgtaagttatggtataagttatttaattacacaaattgcattgtatggcagaattgatgctaatgaaatagagtcaattgatatcttaagtgtcaatgctttctttataattatgtggttacttggtcaaatggctatttggaatttcttgttcttgcgccgagctttacctttaacaaagcaagaattaggtgaagaggagccagaattatcaagaacaagtaaagggaatgtcacgaatcaaactaaaattcacttgaagcaactccaagataagactacagaatatgcacgtaagacaagaagaagtgtcgatttagataaaattagagctaaaagagataaattcaaaaagaaagttaatgatattatcgatattcaagaggacgatattcctgattggatgagaaaaccgaaatgggttaaaccgatgtatgtcgaactattttgtggtgtcgtcatctttttattcacatttttagaatttaataatcgtaatgcattatttgtatctggtgattggaaattatcacagacacaatatgttattgaatgggttacattactaattctgctattcattattatcgcatatatcgctacaacgttaactttccacttgaaaggtaagttttattatttacaattatttatggggagcattttattctttaaattgttaacggaatttataaatataatgattcatggacttctactttcagtgttcattacgccaacattactattaatgttattggcaatcatcatttcttattcgttacaattacgagagcgaccataattaaaagcattataaaagtactatctattaaacattttgatgtgtacgctataagttagatatatctctaacttacttagatacaggtcaatgaagtttatggatagtactttttttgtaactagatttgattgattcgggtaatgtgaattaagtattgaaaattgtatacaaagttttagtgcaaataaaatagttgaaaagttatccatttgcaaaatcatgaaaactagtaaatagttgaagtgacaagtggaatttgcgaaacgatatatagtatctcatttatagaaatttaacatatatcattcgaataactaatttgttaaaatcaacagtaagattagaagtagatgatattgaaatttggcaaacaatttaatctatataaaactacaacgaaacacagaaaggaagttgtcagatgaaaatagcaactctgaacaaaggcaaagaaacaaaatattttaatggatatcctttaattgaagaagaggatatctattcacaagatcatttaaaagaaggagatatttttcaaattgtgactgataaatcacaatatgttgcaacggcttatgttggtcgtcaacataaaggattaggttgggttctaacatacgataaagctcaagaagtcaacacagctttctttgtgaaattgtttaatactgcattagcagaacgtgattattattttaatatagatagaacaaatgcttttagattatttaatgccgaaggtgatggaattgggggattaacgatcgacaattacgatggtcatttgttgattcaatggtactcaaaaggtatttataaatttaaatatgccattcttgaagcggttagaaaagtatttgattataaatctatatacgaaaaagtaaggtttaaagacagcgaatatagtggtggttttgttgaaggcgatgcacctgagtttccaattgttatcgaagaaaacttcacattttataatgtagaccttgaagatggtttgatgacaggtatttttttagatcaaaaagaagtgcgcaagaaattaagggatcaatatgccaaagaacgccatgttttaaacttatttagttatacaggtgctttttctgtaatagcagcaagtgaggcatcttcaacaacaagtgtagatttggctaatcgttctcgtagtttaactgaagaaaattttggattaaatgctattgatcctaaatctcaatatatttatgtcatggacacttttgatttctataaatatgctacacgccatggacatagttatgacacgatcgtgattgatccacctagctttgcacgcaacaaaaaacgtacattttcagtgcaaaaagattatgacaaattaattactggcgccttaaatatcttatcatctgaaggaacattattattatgtacaaacgcaagtgtatatccattaaagcaatttaaaaatactattaaaaagacgcttgaagagagtggcgttgattatgaattaactgaagttatgggattaccaaaagattttaaaacacatccacattataagccatctaaatatttaaaagctgtttttgtaaatattagacattaatttgataaaaaggggtatagtatcttattgagaaaaagaagggtgatgatacaatgggattcaaaaataatttaacatcaaatttaacaaataaaattggtaattcagtttttaaaatagaaaatgttgacggaaaaggtgcaatgccaacgacgattcaagaattgagagaaagacgcgaacgtgctgaagcaattgtaaagagaaagtctttaatgtcatcaacaatgagcgttgttccaattcctggattagactttggtgttgatttaaaattaatgaaagatattatcgaagatgtaaataaaatatacggattagatcataagcaagttaatagccttggggatgatgtgaaagaaagaattatgtctgcagcggcaattcaaggtagtcaatttattggtaaaagaatttcaagtgcatttttaaaaattgtaattagagatgtagcaaaacgaactgcagctaaacaaacaaaatggtttcctgttgtaggacaagctgtgtctgcatctattagttactattttatgaataaaattggaaaagatcacattcaaaaatgcgaaaatgttattaaaaatgtcatgtaggtgctataatagttttgcaatttgcaaattttactgaaaccggttttaaacgaattgaatttaaagcatggttttggtaaagttaaggtataaaactaagttagtattgtaataatattgaagattctaactatacgaaggagaaatgtaattatggaacaaaattcatatgtaatcatcgacgagactggtattcacgctagaccagcaacaatgttagttcaaacagcttcaaaattcgattctgatatccaattagaatataacggtaaaaaggttaacttaaaatcaatcatgggtgttatgagccttggtgttggtaaagatgctgaaattacaatttatgctgacggtagtgatgaatctgacgccattcaagcaatcagtgacgtcttatcaaaagaaggattgactaaataatcatgtctaaattaattaaaggaattgctgcatctgatggtgttgcaattgctaaagcttatttgttagttgagccagacttaacattcgacaaaaatgaaaaagtcactgatgttgaaggagaagttgctaagttcaataacgctatcgaagcttctaaagttgagttaactaaaattagaaataatgcagaggttcaattaggtgctgataaagctgctatctttgatgcacatttattagttttagatgaccctgaattaattcaaccaattcaagataagattaaaaatgaaaacgctaatgctgcttcagcattaacagatgtaacaacacaatttgttacgatttttgaatctatggataatgaatacatgaaagaacgtgcggctgatattcgcgacgtttctaaacgtgtgttatcacatattttaggtgtagaattaccgaatccgagtatgattgatgaaagcgttgttattgtagggaatgacttaacgccatcagatactgctcaattaaataaagaattcgtacaaggttttgctacaaacattggcggaagaacaagtcactctgcgattatgagtcgttctttagaaattccagcaattgttggtacaaaatcaattactcaagaagttaaacaaggcgacatgattatcgtagatggattaaatggtgatgtaatcgttaatccaactgaagatgagttaatcgcttatcaagataaacgtgagcgttattttgctgacaagaaagaattacaaaaactacgtgatgctgatactgttacagttgatggtgttcacgcagagcttgctgcaaatattggtacacctaatgatttgccaggtgttattgaaaatggtgcacaaggtatcggcttatatagaactgagtttttatatatgggtcgtgaccaaatgcctacagaagaagaacaatttgaagcttataaagaagtattagaagcaatggacggtaaacgtgttgttgtacgtactttagatataggtggagataaagaattatcatacttaaacttgcctgaagaaatgaatccattcttaggttaccgtgcgattcgtttatgccttgcgcaacaagatattttcagaccacagctacgtgcattattacgtgcatcagtttatggtaagttaaatatcatgttcccaatggttgcaacaattaacgaatttagagaagctaaagctatattattagaagaaaaagaaaaccttaaaaatgaaggtcatgacatttcagatgatatagaattaggaatcatggtagagatacctgcaacagcagcattagctgatgtctttgctaaagaagtagatttcttcagtatcggtacaaatgatttaattcaatatacattagctgctgaccgtatgtcagagcgtgtatcatatctataccaaccatataatccttcaatcttacgtttagttaaacaagttattgaagcgtcacataaagaaggtaaatggacaggtatgtgtggtgaaatggctggagatgaaacagctattccattattgcttggtttaggtttagatgagttctctatgagtgcaacgtctattctgaaagcaagaagacaaattaatggtttaagtaaaaatgaaatgactgaacttgctaaccgtgcagtcgactgtgcaacgcaagaagaagttattgaattagttaacaactacgtaaaataattaattctttcgaaagacagaattataaataaacccgaagtattcattgtgagtaattatgaatacttcgggttcttttttttgatttatgttaatttcaatggaatgttgttgctaactaattaaacaactaggtgccattgacataaatattgttctttaattaatgttagttaatttaaaaatcgatatttaatttatgatagctaaaaatgatgaagttgatttagatgaaaattaatcttggatatttaatactttgttgatttcatcaagatcaacatggtacattggattgccattcaacaaaataaacggagttgaaaaagcatcaaaatctatcatttcgtttcgatattgttgattgttgatatttctctcttcaaaatcaatttgacgctcatttagataattttttacaaatgtacaaggtggacaatcattctgtgtataaacgattatttctgacatgtatcatgctccttcgtgctttattctaatgtaatatacacaattatacattgaaattcaaatttgtgaacacattgtgaactgacataaattatacacaatttcatagcgcataatgttttaaaaatacacattatagcaattataattaagttcattgtgttgtcatcaaaaaaagaaaaaggtgatgtttttaaatggatacagttgaaatcagtcggtttttgacagctatgactttagcagttcatatcatttttgcaacgattggtgttggtatgcctttaatgttcgcaattgcagaatttttaggtattcgcaaaaatgatcttcaatatatagctatggccaaaagatgggctaaagcttatacaattactgtagcagtgggagttgttacaggtacaattataggacttcaattatcattaatttggcctacatttatggaaatgggtggacacgttattgcacttccattatttatggaaacatttgcgttcttctttgaagctattttcttaagtatatatttatatacttgggatcgttttaaaaataaatggacacatttcttaattagtataccagtaattattggtggctctttctcagcattcttcattacttcagtgaattcatttatgaatacgcctgcaggttttgagttgaagaatggaaagatggtcaatgttcaacctatagaagcgatgtttaacccatcgtttatagttcgatcatttcacgtaattactacagccggtatgacgatggcatttgttattgcatcaatagcagcttttaaattattgcgtaatcgtcaacctaaagatactgtctaccataagaaagctttgaaaatgtctatgatagttggattcttttcaacattactttctatgttggcaggggatttatctgcaaaatttttgcataaattccaacctgaaaaattagcagcttatgaatggcatttcgatacatcttcccatgccaaattattattatttggtgtgttagatgaaaagactcagcaagttaaaggtgcgattgaattacctggactattgagtttcttagcagataatagtgtcaaaactaaagtgcaagggttaaatgattttccgaaaagtttacatccgcctatgattgtccattatttctttgatttaatggtaacgatgggaattttatgttttgtcatttcaggtgtttatgtcttaactttaatgtttaaaaagcttagaaagttttctactcataaatggatgctttacggaatattattaaccggaccagcttcaatgctagctatagaatttggatggttcttaacagagatgggtagacagccttggattgttcgtggttatatgcgcgtggcagaagcagcaacacaagcaggcggaataaccttcgttacaattttatttggcatattgtacatcattttaatgtatacatgtgcatacgtattaattcgtatgtttaaaaataaaccggcgtatgaagatgtaaatcgcttagccaagaagcaaggaggagaaatagaaaaatgatttatgcatttataggtataacagtgttatggttgtttttattttgctatatcattattgcttctatagattttggggcaggtttcttcgcattgcattcaaagttaactggtgatgaaaagaaaattaatcacttaatttcacgttatttgaacccagtttgggaagttacgaatgtattctttgttttcttcttcgtaggattcgtaggtttctttccagagtcaatcaaatatttaggcacggtattgttaataccaggttcaatagcactgattatgatatcgttgagaaacagtttttatgcatttgaaaattatggtcaagatacaaaattagcatggatgttcatgtatggggtaagtggattattaattccagcttcattatcaactgctttaactattacagaaggtggctatattaatgttcgaaacaatgttatcgatctagattgggtgcagttactattaagcccatttgcttggtctgtagtattcttggcaattatttcagttttatatatttcatcaggatttttgacatattatgctaaaaaagcaaatgacgaaccagcatataatttaacaagacaatggcacatatttttagggccaccgatgattatcatttgtttattcgtatttctatcattacgcattcaaaattctgaacatttttattcagctgtttttgactactggtggttgtttgctataagtttcttattctttgcattagcttcattgttaacattctttaagaaaaagcatggtttggcttttgtatttgttattttacaaatgatgttcgctttctttggctatggaattagtaaattgccataccttttatatccgtttgtaaaaattacagatgcttatgttaatccagaaatgggctggacattagtgattgtctttattttaggtttacttttattacttccatcgttaatattattattaagattatttgttttcgacaaagaatatgttgaaggaaagaaatcataagttgagaagataccccaactttcatttacttgcattactgcatttagataatttagttggggtactcatttataataattttaaatttatattttcaatgaattgatgaaaatcatttaatggagggcgagtatgggtaaagaatatgtagtcatcggtctaggtcgttttggaggtagtatcgttcgtgagttgaatgcattagacatggatgtaatggccatcgaccatgatgaaaatagagtgaatgaatatagtgatatcgctactcatgcggttgttgcagacactacagatgaagcagttatgaaaagtttaggtatccgtaactttgatcatgtcattgtggcaattggtgaaaatattcaatcaagtacgttgacgactttaattttaaaagagttaggtgtaaaaaaagtaactgctaaagcacaaaatgattatcatgcaaagattttaaataaaattggggcagatacggttgtgcaccctgagcgtgatatgggtagacgtattgcgcataatgttgcgagtgcaagtgtacttgattatcttgagttggcagacgagcattctattgtagaattgaaagcaactgaaaagatggcggggcagtctatcattgatttagatataagagcacaatatggaattaacattattgcaattaaacgaggcaaagagttcattatttcaccaaatccaaatattaatttagaaataggtgatattttaattatgattggacatgataatgatttaaatcgctttgaaaaaaatattgcgacgagataatcgggagtgggacagaaatgatattttctcaaaatttatttcgtcgtcccaccccaacttgcattgtctgtagaaattgggaatccaatttctctttgttggggcccatccccaacttgcacattattgtaagctgacttttcgtcagcttctttgttggggcccctgactagaattgaaaaaagcttgttacaagcgcattttcgttcagtcaactactgccaatataactttgtagagcattgaacattgatttatgtttcaagctcatcatatataaagaaaaagctactaaaaatgtgtggtgagtttaattaaaacttcacttcaaagttagtagctttttaattatttattttttgattctttttgttcatttaccttcataatgactggtaaaatcattggttttctagctgttttttcaaataaataaggttgtaatgtttcaatgatagaagatttaatctgatgccattgaatatctttattttgatttaacttactaataacatcagttttgattttacgttgtgcatcataaattaattgacctgattctctcatatatacaaatcctcgagaaataatatctggaccagaaagtaatttatttgtattaaaatcaatgctaacaacaacgataactaaaccttcttcagataatagcttacggtctcttattacaacattaccgatatcaccgataccactaccatcaacaagtacattaccagatggaatgcgaccagctttacgtgctgaatcgtgtgttaaagctaagacatctccgatatcaaagatgaagacattatcttcttcaacgccgcattcaacaccagtctcaccatgtgcttttaacatacggtattcaccatgaataggtaagaaatatttcggcttgattaatcgaagcattaattgttgatcaccttgagaaccatgccctgaagtatggatgttagaaatcttgctgtggataacatctgcaccagctttatacaaggaattaatcgttctgttaatactttttgtattacctgggataggtgatgaactaaatacaacggtatcttcaggtataattttaatttgcttatgagtaccattagcaattcttgataatgctgccattggttcgccttgagaaccagtacatagtatcaataactcatgtttcggtacggtattaattttattaggttcaataaatgtttcaggtggtgctttaatataaccaagttccataccgattttaatattgttttccatcgaacgaccgaacgtaacaattttacggttatttttgatagcagcttcaactgcttgttgaactcggtaaatattagaagcgaaggtagcaaatataatacgacctttacaattacggaagatcttatctacgttttgaccaacttcacgttcgcttaaagtaaaatcaggcacaagtgaatttgttgagtctgaaagtaaacatagaacgccttcttcgcctaattgagccattttagcaatgtttgctggtttgcctacaggtgtaaaatcaaatttaaagtcaccggtatgaactacttttccttcaggtgtatctacgatgacgccataagtttcaggaatactatgcgtagttaagtagaaagaaatcgtaaagtgcttagatttaatcacactgtcctcattgatttcatttagtttagcagtacgtaataaatgatgttcttcaagtttattacggattaaacctaatgctaaaggaccaccataaataggtatattaagttgttttaataggaagggcacaccgcctatatggtcttcgtgaccatgtgttataaataggccaacaattttatcttggttttgaactagatatgtgtagtcaggtataacataatcaatccctaataagttatcatcagggaatttgatacctgcatcgataatgacaatttcgtctttatactcaactgcataagtatttttaccgatttcgcctagacctccaagtgcatatacacctacttcatttggatgtaattgtttcattatttagcaatctccacattaaagtgttctgagttttctttttcgtaatctaaatgtgcgccctctaatttagtgataaattcgatattaaaattacgatctttcaagtaacgacgtacttgttcttctgtttgagcttcaacataaagtgattgtgtattttcacgcacaattacctcgtctctgttatgttgataaaaaactttaaatactgccatgttaaaaattcctcctaagaatgtttgtttaatttattgttaaccctagtaaaatcgtattggagtatatatcgataaattcattccaatcatctctataatgtaacttaataacgatttggttaataactaggttcatcatgtcgttcattttaaaaaattagtgaaataacactaaaatttcagttaaatcttattttacatgatgaatgataataaataaagcagtttatctcactagaaatctaagtatttcgaataaatgtgcagttctatttattaaaataaatgtagagattataaattaatgttaagaaagaattaaaggattttatatgaaacggtaaaatttaaatgaggggataaaaagtttggtagaaaggtgaatatatttaactgttgtttattcgaaaaagttgtacaagaaaaagcttaggacatcatatttatcctaagctttgataattagtaatagtgtgttttaaacttctactgcatctgtatgtggttgtaatgggtggtctttgtcaatgtgatcatagaacattacaccatttaaatgatcaatttcatgttggaaaacaattgctggatatccttttagacgtaattgtatatcattaccttcgatgtctttggctttaattgtaattctattatgacggtgaactagaccagcaacattatcatcgacactaaggcaaccttcaccagtaggtaaataagcttcttgaacgctatgacttacaattttagggttcacaagcatatagtcataagatttgccactgccatcatctggtattaaaacagcaatcatacgtttagaaatattaatttgaggtgcagccaaaccaacgcctgaacgtaaaccgtatcgtttcgcgatttcctcatcttgactatttactaaaaactctctcatggcgattaatgtttctttttcttctttagtgaatggtaattctagctcggctgctttttgacgcaaagttggatgaccatctctaatgatgtctttcattgttaacatatattgcaccttccttattttaatttgttttagttgaatgacagtaaaaaggttgttaagatactcatacatttttatgtgtaagtatgtacaaagttaaccaactactgccaaggtttattttagatagtatatgtaaattttcagatatgctaattgcctaaaaaatgattaaagtgttgatttcaagcaatgatactatagaaatttatttatcatcttgactttaaaaattatattataaatgacgtaactgtcaacagatatacttagtaatgaagatgtgtaatgtaattgtttaaaattgatttccaagcagattttatttatcatttaatttaaatagcaagtggaggtacaagtaatgaaatttggaaaaacaatcgcagtagtattagcatctagtgtcttgcttgcaggatgtactacggataaaaaagaaattaaggcatatttaaagcaagtggataaaattaaagacgatgaagaaccaattaaaactgttggtaagaaaattgctgaattagatgagaaaaagaaaaaattaactgaagatgtcaatagtaaagatacagcagttcgcggtaaagcagtaaaagacttaattaaaaatgccgatgatcgtctaaaggaatttgaaaaagaagaagacgcaattaagaagtctgaacaagactttaagaaagcaaaaagtcacgttgataacattgataatgatgttaaacgtaaagaagtaaaacaattagatgatgtattaaaagaaaaatataagttacacagtgattacgcgaaagcatataaaaaggctgtaaactcagagaaaacattatttaaatatttaaatcaaaatgacgcgacacaacaaggtgttaacgaaaaatcaaaagcaatagaacagaactataaaaagttaaaagaagtatcagataagtatacgaaagtactaaataaggttggtaaagaaaagcaagacgttgatcaatttaaataattaatatgatacagatggcaggaaacaactaatacagttcctattatctgtatctttttttattaaaacagaactttttcaaatggtttaacagtcccatttatttgtggtacaattagtaaggataaaatgaatttctatacaattatgggaaaggtatggtgaattgaatggctcctaagttacaagcccaattcgatgcagtaaaagttttaaatgatactcaatcgaaatttgaaatggttcaaattttggatgagaatggtaacgtcgtaaatgaagacttagtacctgatcttacggatgaacaattagtagaattaatggaaagaatggtatggactcgtatccttgatcaacgttctatctcattaaacagacaaggacgtttaggtttctatgcaccaactgctggtcaagaagcatcacaattagcgtcacaatacgctttagaaaaagaagattacattttaccaggatacagagatgttcctcaaattatttggcatggtttaccattaactgaagctttcttattctcaagaggtcacttcaaaggaaatcaattccctgaaggcgttaatgcattaagcccacaaattattatcggtgcacaatacattcaaactgctggcgttgcatttgcacttaaaaaacgtggtaaaaatgcagttgcaatcacttacactggtgacggtggttcttcacaaggtgatttctacgaaggtattaactttgcagcagcttataaagcacctgcaattttcgttattcaaaacaataactatgcaatttcaacaccaagaagcaagcaaactgctgctgaaacattagctcaaaaagcaattgctgtaggtattcctggtatccaagttgatggtatggatgcgttagctgtatatcaagcaactaaagaagcacgtgaccgcgcagttgcaggtgaaggtccaacattaattgaaactatgacatatcgttacggtcctcatacaatggctggtgacgatccaactcgttacagaacttcagacgaagatgctgaatgggagaaaaaagacccattagtacgtttccgtaaattccttgaaaacaaaggtttatggaatgaagacaaagaaaatgaagttattgaacgtgcaaaagctgatattaaagcagcaattaaagaggctgataacactgaaaaacaaactgttacttctctaatggaaattatgtatgaagatatgcctcaaaacttagcagaacaatatgaaatttacaaagagaaggagtcgaagtaagccatggcacaaatgacaatggttcaagcgattaatgatgcgcttaaaactgaacttaaaaatgaccaagatgttttaatttttggtgaagacgttggtgttaacggcggtgttttccgtgttactgaaggactacaaaaagaatttggtgaagatagagtattcgatacacctttagctgaatcaggtattggtggtttagcaatgggtcttgcagttgaaggattccgtccggttatggaagtacaattcttaggtttcgtattcgaagtatttgatgcgattgctggacaaattgcacgtactcgtttccgttcaggtggtactaaaactgcacctgtaacaattcgtagcccatttggtggtggcgtacacacacctgaattgcacgcagataacttagaaggtattttagctcaatctcctggtctaaaggttgttattccttcaggcccatacgatgcgaaaggtttattaatttcttctattagaagtaatgacccagtcgtatacttagagcatatgaaattgtatcgttcattccgtgaagaagtacctgaagaagaatatacaattgacattggtaaggctaatgtgaaaaaagaaggtaatgatatttcaatcatcacatacggtgcaatggttcaagaatcaatgaaagctgcagaagaacttgaaaaagatggttattctgttgaagtaattgacttgcgcactgttcaaccaatcgatgttgacacaattgtagcttcagttgaaaaaactggtcgtgcagttgtagttcaagaagctcaacgtcaagcaggtgttggtgcagcagttgtagctgaattaagtgaacgtgcaatcctttcattagaagcacctattggaagagttgcagcagcagatacaatttatccattcactcaagctgaaaatgtttggttaccaaacaaaaatgacatcatcgaaaaagcaaaagaaactttagaattttaatacattttaaaagttaacgaagttagcatattttagtctcattgattaaaatgaaatgtttaatttacgaaatcttaggagggcaaaaacgtggcatttgaatttagattacccgatatcggggaaggtatccacgaaggtgaaattgtaaaatggtttgttaaagctggagatactattgaagaagacgatgttttagctgaggtacaaaacgataaatcagtagtagaaatcccatcaccagtatctggtactgttgaagaagttatggtagaagaaggtacagtagctgtagttggtgacgttattgttaaaatcgatgcacctgatgcagaagatatgcaatttaaaggtcatgatgatgattcatcatctaaagaagaacctgcgaaagaggaagcgccagcagagcaagcacctgtagctactcaaactgaagaagtagatgaaaacagaactgttaaagcaatgccttcagtacgtaaatacgcacgtgaaaaaggtgttaacattaaagcagtttcagggtctggtaaaaatggtcgtattacaaaagaagatgtagatgcatacttaaatggtggtgcaccaacagcttcaaatgaatcagctgcttcagcttcaaatgaagaagttgctgaaactcctgcagcacctgcagcagtatcattagaaggcgacttcccagaaacaactgaaaaaatccctgctatgcgtagagcaattgcgaaagcaatggttaactctaagcatactgcacctcatgtaacattaatggatgaaattgatgttcaagcattatgggatcaccgtaagaaatttaaagaaatcgcagctgaacaaggtactaagttaacattcttaccatatgttgttaaagcacttgtttctgcattgaaaaaatacccagcacttaatacttcattcaatgaagaagctggtgaaattgtgcataaacattactggaatatcggtattgcagcagacactgatagaggtttattagtacctgtagtgaaacatgctgaccgtaaatctattttccaaatttctgatgaaattaacgaattagctgttaaagcacgtgatggtaaattaacagccgatgaaatgaaaggtgcaacatgcacaatcagtaatatcggttcagctggtggacaatggttcactccagttatcaatcacccagaagtagcaatcttaggaattggccgtattgctcaaaaacctatcgttaaagatggagaaattgttgcagcaccagtattagcattatcattaagctttgaccacagacaaattgatggtgcaactggccaaaatgcaatgaatcacattaaacgtttattaaataatccagaattattattaatggaggggtaaaacatggtagttggagatttcccaattgaaacagatactatagtaatcggagcaggtcctggtggatacgttgcagcaattcgtgcagctcaattaggacaaaaagtaacaatcgttgagaaaggtaatcttggtggtgtttgcttaaacgtaggatgtattccttcaaaagctttactacatgcttctcaccgttttgttgaagcacaacattctgaaaacttaggtgttattgctgaaagtgtttctttaaacttccaaaaagttcaagaattcaaatcatcagttgttaataaattaactggtggtgttgaaggcttacttaaaggtaacaaagttaacatcgttaaaggtgaagcatatttcgtagataacaatagcttacgtgttatggacgaaaagagcgcacaaacatacaactttaaaaatgcaatcattgcaacaggttcaagaccaattgaaattcctaatttcaaattcggtaaacgtgttatcgactcaacaggtgctttaaacttacaagaagtaccaggtaaattagttgtagttggtggaggatacattggatcagaattaggtacagcatttgctaactttggttcagaagtaacaatccttgaaggtgctaaagatatcttaggtggcttcgaaaaacaaatgacacaacctgttaaaaaaggtatgaaagaaaaaggtgttgaaatcgttactgaagctatggctaaatcagctgaagaaacagataacggagttaaagttacttatgaagctaaaggcgaagagaaaacaatcgaagctgattatgtattagtaactgtaggtcgtcgtccaaacacagacgaattaggcctagaagaattaggtgttaaattcgctgaccgtggattattagaagttgataaacaaagccgtacgtctatcagcaatatctatgcaattggtgatatcgttccaggtttaccacttgctcacaaagctagctatgaagctaaagttgctgctgaagcaattgatggtcaagctgctgaagttgattacattggtatgccagcagtatgctttactgaaccagaattagctacagttggttattcagaagcgcaagctaaagaagaaggtttagcaattaaagcttctaaattcccatatgcagcaaatggtcgtgcattatcattagatgatactaacggatttgttaaacttattacacttaaagaagatgatactttaatcggtgctcaagtagttggtactggtgcatcagatattatctctgaattaggtttagcaattgaagctggtatgaatgctgaagatatcgcattaacaatccatgcacatccaacattaggtgagatgactatggaagcagcggaaaaagctatcggatacccaatccatacaatgtaataactgattatctataaagattcagtcattaaaagctgtagcatatgctacggcttttttgttttaggtaaagtagtgtaaggaaattgatttgagatatcgttaacatgtgacatgcatgttatactagcgatgctaacaaaagaattgaaatggaggcgttcaacaatggaatatgagtatccaattgatttagactggagtaatgaagagatgatttcagtgataaatttctttaatcatgtagagaagtattatgaatccggcgtgacggcaggcgactttatggatgcatataaaagatttaaagaaattgtgcctgctaaagcagaggaaaaacaaatttttaatactttcgaaaaaagtagtggctataatagttacaaagcagttcaagatgtaaaaaatcactctgaagaacaaagagtaacagctaaaaaataattcgttcgaaattaacacaatttaataggattttttctttaaaactattgctaataaagctatattttgatacctttatcaagtgttaaacaaaatgtttgataaaagtaaacttaatatagcttttttaggtggaaaaataaatgaacataggtaataaaattaaaaatcttagaagaattaaaaatttaacgcaagaagaacttgctgaacgtacagacttatcgaaaggctacatttcacaaatagaaagtgaacatgcctcaccaagtatggaaactttcttaaatattatagaggtgttaggaacgacgccaagtgaattttttaaagacagtgaaaatgaaaaagtattatacaagaaggaagaacaagttatttatgatgagtatgatgaaggttatatattaaattggttagtttcaaagtcaaatgaatatgatatggagccattaatattaactttaaagcctggcgcatcatataaaaatttcaatccatcagagtctgatacgtttatttattgtatgtcaggtcagataacacttaatttaggcaaagaggtatatcaagcacaagaagaagacgttttgtattttaaagcacgagataatcatcgtttgtcaaatgaatcaaacaatgaaacacgaatacttattgtagcgacagcttcatatttataggggggatcttatttggaaccgttattatcattaaaatcagttagtaaaagctatgatgatcttaatatcttagatgacatagatattgatattgaatcaggatacttttatacattattaggtccttcaggttgtggtaaaacaacaattttaaaattaattgcagggtttgaatatcctgacagtggtgaagtgatttatcaaaacaaaccaattggtaatttaccgccaaataaacgtaaagtgaatacagtctttcaagattatgcattatttccacacttaaacgtctatgataacatcgctttcggtttgaaattaaaaaaattatcaaaaactgaaattgatcaaaaagtaactgaggcattaaaattagtaaaactttcaggttatgaaaaaaggaatattaatgaaatgagtggcggacaaaagcaacgtgttgcaattgcacgtgctatcgtaaatgaaccagaaatattattgttagatgaatctttatccgcattagatttgaaattgcgtactgaaatgcaatatgaattacgagaattgcaatctagattaggtattacatttatatttgtaacacatgatcaagaagaagcgttagcactaagtgactttctttttgtattaaaggatgggaaaattcaacaatttggtacaccaacggatatatatgacgaaccagtgaatcgatttgtagctgattttattggagaatctaatattgttgaagggcgcatggttagagattatgtcgtgaatatttatgggcaagatttcgaatgtgtcgatatgggtattcctgaaaataaaaaagtagaagtcgttattcgaccagaagatatatcattaatcaaagctgaagaaggattatttaaagcaactgttgattctatgttatttagaggggtccactatgaaatatgttgtatagacaataaaggttatgaatgggtaatacaaacgactaaaaaagccgaagtaggcagtgaagttggtctttattttgatcctgaagccattcatattatggttcctggagaaacagaagaagagtttgataaacgtattgaaagctatgaggaagtagaccatgcgtaatactaataaatttctcttaatcccgtatttattatggatggttatatttattattgtaccagttgtattactcatttatttttcatttttagatatcaatggacattttagtttcacgaattatcaacaaatttttactacaaaatatttaaaaatgtttgcatattcaattttatatgccgctttaataacaattattacgttggctatcagttatccagctgcctattatattactcgctcgaaatttcaaaatatcttattaatgataatgattattccaacatggataaatttattgttaaagacatatgcttttataggtttattaagtcacgatggtgtgattaatcaatttttccacttatttaatttaccatcattcaatttgttatttacaactggtgcgtttttagtagtggcaagttacatttatataccatttatgattttaccgatatttaatagcatgaaagcaattcctaataatttattgcaggcctcaagtgatttaggtgctagtccattctatacttttagaaaagtaatcatgccgttaacaaaagaaggtgttatgactgggattcaagttacctttattccatcactttcattatttatgattacaagattaattgcaggtaataaagtcataaatataggtacggcaatagaggaacaatttttaacaattcaaaattatggtatgggatcaactatagctatattcttaattgtatttatggcattcattttaatcattacaaaatcatctaatgggagagggtgagtcatatgaaatggtatggaaagctgtatatcgggatacttttagcgattttatacatcccaatattctttttaatgttctattctttcaattcggctggtaatatgattcactttgaacattttacactagagcattaccaatcattatttcaaaatgatcatttaatgtcggtcatttttaatacgatagctgtagcacttttagctgcttcaatttctacagttattggtacatttggtgccattgctatttattatttaagaaataaaaagtttaaagtaactttactaacattgaataatgtcttgatggtatcatccgacgttgtcattggtgcatcattcttaattatgtttacaacgattggccattttactggtcttggtttaggattttggacagttctaatatctcatattgcattttgcatacctatagttgtgattatcgtcttaccacaactgtatgaaatgaataataatatgttaaatgctgcaagagatttaggagcgactgaaccacaattattaagcaacattattattcctaatattttaccttctattataggagggttctttatggctttaacttattcactagacgatttcacagtaagtttcttcgttactggtaatggctttagtgtgttatcagttgaagtttatgctatggcgagaaaaggaattagtatggaaattaatgcgatttcaacattattgtttgctgttattgtattaggaatactaggatattatttgattcaatacgtgataaataagaaaaaactaatcaagcgaggtgtaaaataatgaaacgttttttacaactcattataggtgcattagttgtgggtatgctttgtcttactttaagtcattggtttaaatctaaagaacaagtgcatacaaatcaaaaaatttacgtatacaattggggcgaatatattgattcagagttaattaagaaatttgaaaaagaaactggcattcaagtcgtttatgaaactttcgattcaaatgaagcgatggaagccaaaattcgcaatggcggtacacattatgatgttgcttttcctagtgaatatacagttcaaaaattgaaaagagatcatttattgttaccaatagatcataataaggtacctaatattaaaaatttggattcagattatatgaatatgtcatttgataaaggcaataaatattctttaccttatttttttggaactgtaggtattttatataataaagaaaagtatccaaatgaatcatttgatagttggaagtcgttgtataatcctaaatttaaaaaccaaattttactagttgacggtgctagagagattataggcatgagtttgaataaacttgggtataatcttaatgaccgtaattcgcaccatttaaaagaagcagagcgagatttaaccaaactagcaccacaagtaagaggtgtcgtaggtgatgaaattaccatgatgcttcaacaaaatgaaggtaacatagcggttgtttggagtggtgttgcagcacctctagtgcaagaaggggataaatataactatgttattcctaaagaaggatcgaatttatggttcgacaatatggtaattccaaaaacggcacaaaataaagagggtgcatataaatttatgaattttttattagaagctaaaaataacaagcaaaatacagaattcgtaggctatgcaacgccaaacaaggctgctcgacaattgttgcctaaagaggttaaagacgaccatcgtttctatccgactaagaaagagcaagaacgccttgaagtttataaagatttaggacctgaagttttaagtgaatacaatgaaaactttttgaatttcaaaatgtcattaaaataaaatcataaatagtagttatttactgtatatttagttataataacgggataagtactataaggagttgtaacgaatgactggagaacaatttactcaaattaaacgtccagtaagtagattaactgaaaaagttctaggttggttatgttgggtgatgttattagtgcttactgtcattacgatgtttatagcacttgtttcattcagtaataacacatcgattgctaatcttgaaaatacattaaacaataatgcatttatccagcaattattagctggaaatgactataatacaacacaatttgtaatatggttacaaaatggtatatgggctattatcgtttactttattgtttgtttgttgatttcatttttagctctcatatctatgaatataagaatcttgtcaggtttcttattcttaatatcagcaattgtaacgattcctttagttttacttatcgttactttaatcattccgatattattctttattattgcgatgatgctatttataagaaaagataaagttgaaatggttgcgccacaatattatgaagagtacaatgggccgatttatgattatcgtgaacctgtgtatgagcgcccacaaccgaaagatgattattatgatgtgcctaaatatgaaaaagaattggataaatcaaacactgtatatgatcaagaacaggaaagagataaatatgatcaatttcctaaacgtgcagttgaaagtgaatataatcatgatgagcgcactgaggaagaaccatcagtattatccagacaggctaaatacaaacaaaaaagtactgaagaactaggtattgaagatgatggttattatgcagaacctgaagttgatccaaaagaattgaaagcacaacaaaagcgagaaaaagttgaaattaaagctaagaaaaaagaaaaacgtaaagcttataaccaacgaatgaaagaacgtaggaaaaatcaacctagcgcagttagtcaacgtcgaatgaattttgaagagcgacgtcaaatttacaacaatgatatttctgaagaacgcaattcaagtgaagttaaggacaaaaaagagcaagaataaatattgatgatacccagattagtaagtagaggtctattgcttattaatctgggtttttatatgaggttaattatcgctaacgtttaattaaattgtttaggtgtcaaaattttaaatgacgatttctcattaccatacacctaaattaccatcaatctgaattcagatgtttattataaaaattagatgaaaaatatgttaatatacaagtaaattaatgtgcgtatatctataggctcgtagtatacttattaaaatattaaacaaagaaaggattttaagatgaatagaaaacctgaattaatcatggcttggattgcaaatagtattagtattatttatttattagttatggggctatcctatttttctttaaaaagtggtaatgcatcacaacgtgaagaattagcgaagcaattatctcagaacggtggcaaggtttctttagatatgcttcagacaacaatgggtgcattagcaattattttattaatttcaacactttatggtatatttgcgacaatttgtattaaaggacgtagaaaattatcgattatactttttgttatcgcgataattgtaagtttgatggctcttaatttaattgcaattgtcttatggattatcgtgatgattatgttgatttctaaaaaagaatcaaaagaaactacacataaggacgatgagtatatttatcattaatatgttcatagcaaaagaataaccattaaaatgttaagttgttaattattagatacaaccaacattttaatggttttatttttaaccttgtagttcttggaatgtttgaacgattaaatagacatttaaaatacttagaataataataagtgtccatgaaatgatattaacccatgttttattatagaaaggtcccatcaagtctttattactagtagctaattgtaatggtattaaacagaatggcagagcaatacttaaaaatacttgagagaatacaagtagttgctcaattttagctgcattacctttaaaaatgattaaacatacgataacaggaatgacagcaagggaacgtgtaattaaacgtcttaaccaatttggtatgtgtaatcttaaaaatccttccattacaatttgtcctgctaaagtaccagtaatcgttgaattttgacctgacgctaataatgcaactgcaaataatgtactcatgattgcacccattgttgcacctagtacaggttcagtttttaaggcgtgatataaatcatagaaaccacctaaatcgtcagcgtttgagttgaaaaatagtgatgctcctaacactaataataagcaattgactacaaatgcgattgataactgaatgttcgaatctatcgtagcaaatttaatcgcttgcgccttttcttcattgttatgtcttgagtatgttctagattgtacaattgatgaatgtaagtacaaattatgaggcataattgtagcgccaataatacctaatgcaatatagagaatgccgttatttgtaatgatttcactatgtggtataaatccatttaacacagcgttcaactgtggtgatgaaatatagacttcaaatataaagatgaataacaccgtgaaaattaatgtaccaacaatagcttcaatttttctaaaaccatatttcattataaatagcagtaaaaatacatcaagtacagttattagtgcaccgacgattaaaggtatgttaaataggagattaagagcaatagcactaccaataacctcagcaatatctgtagcgataattgctagttctgcaatgatccaaaagattatagcaataggtcttgataaataatgtcgtgtcatttgagctaagtccatacctgttgctattcctaatctcactgtcatgctttgaagtaacattgctgataaacttgaaataagaattacgaatagcaaagtatagccatattgcgcgccaccttgcattgatgttatccagtttccgggatccatgtaaccaacagcgactaataacccaggtccaagaaatgataaaaatttctgtttatttgaactgcgatgatcgaatttaattgtattgtttatttcgtctaaacttaattgttcatttgttgaatgtcttttattattcattttgactcacctctacttcttatggacaatataataacctaataaaatgtttaggtcaacctaaatttattttaattttttaaaagtatgaattattatgttgaacgttcgatttaatggtaagaaaaaagagcacgaaatcatggatgtgattacgtgctctattatttaaacaaagttatttatgcagaataaaatggtaagaactgatcgaaggtttcttctaaaaatgcaataaatgctttgtcactttttaatcttttatcttgtggtgtgattgcacgcgctataaagaattcaccttttttcacattgatggctctttgtatcgcttcttttaaatcatcatctgttaaatctttaataaatggtttatcaggtttcatatgatctaagcaaacacgataatcatcaggtaattgttgaatagctttaaattttctttcaaaaacttttgcacgtgttgctttatcttttgcttcatgcatgattccaaacataacaaacagttgatcttcaaacataccaatttggaaatgaggtaacattttatagcctcttttgtttgttgcaaaagcaacccatgtatctttaggaggattcacacttcttctagcatgctttgctacgtgaggataaaatgtttcaccagtttgacttgtaaagaagtcactaaaatattctcctaattcatggagttgtggtcgtatgtattcgtttaaagcttccattcgtgcgtctaagccttctacgttgaacgctttgaaatctttaggtttaaatgtatattttgtcatagagtacctcctgtatagtgtttaaaaatattgtagcatatgttttatcaatagcagcttaagatgctctcattaaaattagtattttcatttttatcttaagaagttatttttataaaatgttgatgtataataaagatgttaggagatgatgttatggcactttatggatttgcccaaggacttattcaagaagcaggaattagaattaaacaattgatggagcaaaatttaacaattgaaacaaagtcaaatccgaatgaccttgttacaaatgtagataaagcaacagaagattttatttttgatacaattttagaaacatatcccaatcatcaagtattaggtgaagaagggcatggtcatgacatcgatacttccaaaggtacggtatgggttgttgacccaatagacggtacattgaattttgttcatcaacaagaaaatttcgcgatttcaattggtatttatatcgatggtaaaccttatgcaggttttgtatatgatgttatggctgatgtcttatatcatgcaaaagtaggggaaggtgcatatcgaggtagccaacccttgaaaccattgaatgattctaatctaagacaaagcattattgggatcaatcccaactggttaactaaaccaattttaggagaaatctttaaagaaattgttaatgattctagaagtgcaagagcatatggtagtgcagcgcttgaaatcgtttcagttgctacaggtaatttagaagcatatatgacgccaagacttcaaccatgggattttgctggcggattggttattttatatgaagtaaatggacaagcttcaaatttactaggagaaccattaacaattagtggtccaaattcaatcttagttggaaatcgtggtctccatcaagaaattagcaatgattatttagagccacatcgcgatgcgttaatacaattacatgaacaacgatttaaaagaaaatcaaaataattaccaaaagcgtaatatgtagtcctaacaattaggtgacatattacgtttttatatcttaaataataaaaaaacgcgccaatataaaaccatttaaatgttcatcatgaacatgtgtggtctttaatcaacgcgtgttattgtcgatatgacttatagccaatcgttttctcgatattttttctttgtagtaaatccaattccaaaggttgcaacgagtaatataaatgttaaaatcatcattggtacatttgatgcaccaacagcaaaactaaataatactaagaaaataacagctaatatagaaaatacccaaaagatatttttagattttttttgtttcatcctatccccaccttttgcttatcttttctcaattatatgatataataaaaaagttgtaattaaaagtgggattttacttaagaaagaaggaaactatttatatgactaataaaagagaagatgtccgcaatatagcaattattgctcacgttgaccatggtaaaacaactttagtagatgagttgttaaaacaatctggtatattcagagaaaatgaacatgtcgatgaacgtgcaatggactctaacgatatcgaaagagagcgtggaattacgattctagccaaaaatacggctgttgattataaaggtacacgtattaatattttggatacaccaggacatgcagactttggtggagaagtagaacgtattatgaaaatggttgatggggttgtcttagtagtagatgcgtatgaaggtacaatgcctcaaacacgttttgtacttaaaaaagcgctagaacaaaacctgaaacctgttgttgttgttaataaaattgataaaccatcagcacgtccagagggtgttgtagatgaagttttagatttatttattgaattagaagcaaacgatgaacaattagaattccctgttgtttatgcttcagcagtaaatggtacagctagcttagatcctgaaaaacaagatgataatttacaatcattatatgaaacaattattgattatgtaccagctccaattgataacagtgatgagccattacaattccaagtagcattgttggactacaatgattatgttggacgtatcggtattggtcgtgtattcagaggtaaaatgcgtgtcggagataatgtatcactaattaaattagacggtacagtgaaaaacttccgtgtaactaaaatctttggttactttggattaaaacgtttagaaattgaagaagcgcaggctggagatttaattgctgtttcaggtatggaagacattaacgttggtgaaactgtaacaccacatgaccatcaagaagcattgccagttctacgtattgatgagcctactcttgaaatgacatttaaagttaacaattcaccatttgctggccgtgaaggtgactttgtaacagcgcgtcaaattcaagaacgtttaaatcaacaattagaaacagatgtatctttgaaagtttctaacacagattctccagatacatgggtagttgctggtcgaggtgaattgcatttatcaatccttattgaaaatatgcgtcgtgaaggttatgaattacaagtttcaaaaccacaagtaattattaaagaaattgatggtgtaatgtgtgaaccatttgaacgtgtgcaatgtgaagtgccacaagaaaatgcaggtgcggttattgaatcattaggtgcacgtaaaggtgaaatggttgatatgactacaactgataatggacttacacgtttaatctttaatgtaccggctcgtggtatgattggttatacgactgaatttatgtcaatgacaagaggttacggtattattaaccatacatttgaagaatttagaccacgtattaaagcacaaattggcggtcgtcgtaatggtgcattaatttcaatggatcaaggttctgcaagtacttatgccattttaggacttgaagatagaggtgtaaacttcatggaacctggtactgaagtttatgaaggtatgattgttggtgaacataatcgtgaaaatgatttaactgttaacatcactaaaacaaaacatcaaactaacgtacgttctgcaacgaaagaccaaacacaaacaatgaatagaccgcgtattctaacattggaagaagcgttacaattcattaatgatgatgaacttgttgaggttacaccagaaagcatacgtttaagaaagaaaattttaaacaaaaatgttcgtgaaaaagaagcaaagcgtatcaaacaaatgatgcaagaaaatgaataattaacataataaaagagaagctgagcgatgaaagttgcttagcttctcttttggcatataatatttgaaaaagtgttttaatgctatcagttcctgttactttcacattttcaaatttctaacttgttaattcagatattaatcgagcggatagtgttgcgcacgttgtttaggggtgtctagtcgacttttacaatcatcgcacataaatgttcgaataggattgtttttaagtcgtttagactcagttgtgcgctcatctataaatacttttgcatcacagataatgcattgcacttgtctcaaattaaatcacctcaatatgagttacatggttgattcgatatgaataaccatcttcttgattgtaaataaaactatctacaccattatcgctgtaaagtcgtttaccgtcttttgcaaattggaaaaataaatagggcaatagatctatcggtatatctaaatgatcatgctcatttgataatcgaatagtagttgcagagtcatgtggttcggaatgtttgaaaaatggtgtcatattaatgacaaatgaaccttctaacatggcacgttttttatattttatttctgaatttaaagtaggaggattagtttgtccttctaggatagcacgattccattcatgattatcttcaaagtcgattggttttgaaccatcaaatacacctttttctaaatcttcgatgctaacttttctatcatcgaaaatccaagtcgtactatctaatgttataggaaactttacagctcctttaatttgtatcattttcccactccctatcaatgtatatagcattattttaacacaaattgctaacgacacattttaaatctacttgctttttaatatttagtaagataaacttttagtaagacttgagaatttatatagagggggagcgtgtcatggcgaaacaagcaacaatgaaaaatgcagctttgaaacaattgactaaagatgctgatgaaatcttgcatctgattaaagttcaactagataatttaacattaccttcatgcccattatatgaagaagtactagatacacaaatgtttggacttcaaaaagaagttgattttgctgttaaattaggtttagttgaccgcgaagatggcaaacaaattatgttacgtcttgagaaagaactttcaaaattacatgaagcttttacacttgtttaagttttaatatataagcatattaaaacggcgtgagatatcgacaattgagcagcgccgattttatatttataatttaattactgattaaagtggctgttatgttgtcttcttgatgacatgtcagtcacttttattgggttttagcaattcacgatattaagtaaacaaatattctataaattacctcaagatacctgttaatatttgtgattatgactgtgtcatgtatataataagtaacatggatttttaaaattaaagtataaaacgaaatcatttgaagtataaattgtagaattggatgactgaatatatgaagaattttagaagtattttacggtatattggtaaaacctcaaagtttattgattacccgttattagttacatatattgtattgagtttaattggattagtgatggtatatagtgccagtatggttccagcaactaaaggtacattgactggtggtatcgatgttccaggaacgtatttttacaaccgacaattagcatatgtcataatgagttttataattgtattttttattgcatttttaatgaatgttaaattactgagtaatattaaagtgcaaaaaggtatgattataactatcgtttcgctattattactgacgttagtaatcggtaaagatattaatggttctaaaagttggataaacttaggatttatgaacttacaggcatctgagttattaaaaattgcaatcatattatatatcccatttatgattagtaaaaaaatgcctagagtattaagtaaaccaaaattaattttaagtcctattgtattagcattaggttgtacgtttttagttttcttacaaaaagacgtagggcaaacattactaatattaattattttagttgcgattattttttattcaggaattggggtaaacaaagtcctaagatttggaataccagcagtactaggattcttagtagtatttgtcattgcattaatggctggttggttaccaagttatttaactgccagatttagtacgctaacagatccattccaattcgaatcaggaactggataccatatttccaattcattgcttgcgataggtaacggtggcgtatttggaaaaggattaggaaatagtgcaatgaaattgggctatttaccagaaccacatacagattttatttttgcaattatttgcgaagaattaggtttaatcggaggattgctagttattactttagagttctttattgtatatcgtgccttccagtttgcaaataaaacatcatcatatttttataaacttgtgtgtgttgggattgccacatactttggaagccaaacgtttgtaaacattggcggtatttcggcaacaattccattaactggtgtgccattgccatttatcagctttggtggatcatcaatgattagtttaagtattgctatgggattacttctgattgtaggtaaacaaatcaaagtagaccagcaacgaaagaaacaacaacaaaaagttgatataagaagacaatttaattaaaaaatactagccaatatttagcgcgagatgacttctgtcattaagcaatgctaaacattggctatttatatactctttgtcaaattggactgatgagttcaataacggaagttaggcaaccaaacaaggcttaacttcctttttgttttgatattacaatattactcatgattatcaaattttataaacaaaacaacgtataattataactaaattttatgactaaaaatcactaaatgtggtggcgaaattagaatcatgatgataagataaagttatcgctattgataataaatgttgatgttttacaattttatttttaattttttagagttgtagaaatcgaaaatgtttcacaacaaaaacgtgaactacctgttgttgcataatcatttttgaaattattatttttgaagcggaggttttaattgtctcaagaatgttaaattttgaaaatttgaaacataactatagcaaaacagagcgctttaagataaaattttattatctaattagttagaaaattctaatagtttgaggagtgtatcgctattgaaacaaataaaaaagttacttgttgctaaccgtggagaaattgcaattcgtatattcagagcggcagcagaattagacatcagcacagttgcaatttattcgaatgaagacaaaagttcattacatagatataaagcagatgaatcctatttagttggaagtgatttaggtcctgctgaaagttatttaaatattgagcgtatcattgatgtagcaaaacaagcgaatgtggatgcgattcatcctggctatggatttttaagtgaaaatgaacaatttgcgcgtcgttgtgcagaagaagggattaaatttattggtcctcatttagaacatttagatatgtttggagataaagttaaagctcgtacaacggctatcaaggcagatttaccagttattcctggtacagacggtccaattaaatcatatgaattagcaaaagaatttgcagaagaagctggtttcccgctaatgattaaagccacaagtggtggcggcggtaaaggtatgagaattgttcgtgaagaaagtgaattagaagatgctttccatagagcaaaatcagaagcagaaaaatcatttggtaatagtgaagtttacatagaaagatacattgataatccaaagcatattgaagtacaagtcataggtgacgaacatggaaatatcgtacacctatttgaacgtgattgttcagtacaacgtcgtcatcaaaaagttgttgaggttgctccatctgtaggcttatcatcagatctacgtcaacgtatttgtgatgctgcaattcaattgatggaaaatattaaatatgtcaatgcaggtaccgttgaatttctagtatctggtgacgaattcttctttatagaagttaaccctcgtgtacaagtagagcatacaattacagagatggtaacaggaattgatattgttaagacacaaattttagttgcagcaggtgccgatttatttggtgaagaaattaatatgccacaacaaaaagatattacaacattgggctatgccatccaatgtcgtattacaacagaagatccgttaaatgatttcatgccggatactggaacaatcattgcttatcgttcaagcggtggctttggtgtacgtcttgatgctggagatggtttccagggtgctgagatatcaccttattatgattcattactcgtaaaattatctacacacgcgatatcatttaaacaagcagaagaaaaaatggtacgttcattacgagaaatgcgtattcgtggtgttaaaactaatattccattcttaattaatgtaatgaagaataaaaagttcacaagtggtgattacacaactaaatttattgaagaaacaccagaacttttcgacattcagccgtctctagatagaggtactaaaacattagaatatataggtaatgtaacaattaatggtttcccaaatgttgagaaacgtccgaaaccagactatgaattagcatcaattccaactgtatcttcaagtaaaatcgcttcatttagtggtacaaaacaattacttgatgaagtaggtccaaaaggtgtagctgaatgggttaaaaagcaggatgatgtcttattaacagatacaacttttagagatgcacaccaatcattgttagctacacgagttagaactaaggatatgattaatatcgcatccaaaacagcggacgtatttaaagatggtttctcactagaaatgtggggcggtgctacatttgatgtggcatataatttcttgaaggaaaacccatgggaacgacttgaacgtctacgtacagctattccaaatgtattattccaaatgttgttacgtgcttcaaacgcagttggttataaaaactatcctgataatgttattcataaattcgtacaagaaagtgctaaagcaggcatagatgtctttagaattttcgattcattaaactgggtagatcaaatgaaagttgccaatgaagcagtacaagaagcgggcaaaatctcagaaggtactatttgttatacaggtgacattttaaatcctgaacgatcaaacatttatactttagagtattatgtcaaactagctaaagagttagaacgtgaaggtttccatattttagcgataaaagatatggcaggcttattaaaacctaaagccgcttacgaattgattggtgagttaaaagcagctgtagatttaccaatccatcttcacactcatgatacaagtggtaatggtttattaacgtacaaacaagcaatagatgctggtgtcgatatcattgatactgctgttgcttcaatgagtggtttaacaagtcagccaagcgccaattcgttatattatgcattaaatggcttcccacgtcaccttagaactgatattgaaggtatggagtcacttagtcattattggtcaactgtacgtacttattattcagactttgaaagtgatatcaaatcaccgaatactgaaatttatcaacatgaaatgcctggtggacagtattcgaatttaagtcaacaagctaaaagtttaggtttaggcgaaagatttgatgaagtcaaagatatgtatcgcagagtgaacttcttatttggtgatatcgtaaaagtaacgccatcgtctaaagtagttggtgatatggcactttatatggtacaaaatgatcttgatgaacaatccgtgattacagatggttataaattagatttcccagaatcagtagtgtcgttcttcaaaggtgaaataggacaacctgtaaatggttttaataaagatttacaagcggttattttaaaaggccaagaagcattaacagctcgtccaggtgaatatctagagccagttgattttgaaaaagtccgtgagttgcttgaagaagagcaacaaggtcctgttacggagcaagatattattagttatgtattatatccaaaagtatatgaacaatatattcaaactagaaatcaatacggaaacttatcgttacttgatacgcctacattcttctttggaatgcgtaatggtgaaacagtagaaattgaaatcgataaaggtaaacgattaattattaaactagaaacgattagtgaaccagatgaaaatggtaatagaacgatttattatgcgatgaatggtcaagcgagacgtatttatattaaagatgaaaatgtgcatacaaatgcgaacgttaagccaaaagcagataagagtaatccaagtcatattggtgcgcaaatgccaggttcagtaactgaagtcaaggttagtgtaggtgaaactgtgaaagctaatcagccgttgctaattactgaagctatgaaaatggaaacaacaattcaatcaccatttgacggtatgattaaacaagtaactgtaaataatggtgacacaatagcgacaggcgatttattaatcgaaattgaaaaagcatctgactaaaatgattaaaataaaacgagattacacaacgattgacgtgtaatctcgtttttacttgtcttaggcttaggtttaattttaaatattgatataaaaaaaccgtaattttaatgggcgtgccattaaaattacggtttgcttttttgttattgcttgtcacttcttactgatcgtaacattagcatgataaagtatgttgtcataccaaataaataagtgataaataatgcatggaatagtgcgattatcaagttaacatttgtcataatagacaatgcacctgtgataacttgtaatataacaagtataaatgcagctgtataaccataatgaaccgtacggttatttggataatttttaacagcgtgaatataagtaatcataataatcgtaaacactataaaagccatgatacgatgcgtgagttggacccaatcttgttctgaatgtggtacaagatcgtggaatggcaatggccaaccaccatatgctaaacttgcatccgcatgtcgcactagtgcaccagtgtaaacaccacaataaatgatgattgccattaaccatgttaaacgtcttaatggctttttgatatataattcgtcagcttcatatttttgatctatagagaaaataatcaatgttattaaaaatacagatgagaaactgattaatgatataccaaagtgcaatgctaaaacgtaatcgttttgttgccaaataacagcagcagctccgattaatgcttgcaataataagaatccaacactaatgattgataaaggtttaatttctttaatatagcctatatgtttccatgcagtgataactaaccataagaccattaataaagacaaagctgaaacggctctatgacttaattcaataatcgtatcaataggaaagaattctggaatcaacgcaccatgacatagtggccaagaagaaccacaaccatcagctgatccggttttggtaactaaggctccaccaagttgtacaaatgtcatcattaacgttgctacgacacctaaccattttaaattctttttgccaaacaatttatacaccccatcataaaaaaacgcatcactgagattttgatttaatagctgaacttgagttaatactatgaatgaacctaacagttggatttgaagagatgggatccaacacagtttatataatttaattgtttctagtattagaagtgatcgactatcatcaatgatatgaataacacgacaatgatgtgccgttcactgctataaaatttcagtcacagttactcaaatttgaagcttaaatattaatctcttttagatgcatgtttctacttattaaaattttctaacatatacattatagcaataaattaaatgttatttgtgtcacaaaattgacattttctcttgtcgttaatttgtcacaatttaattttattaaacctagtctttttatgcaatctaagatatcataatcttatatgaacaaatttaaggagggggattatgagcaaagagcatactttgtcacaaaatattagcagagttaacttcaaagaattgcaacagataattaaaatgggacttgttcaaggtaacttaattccggcttttgcgggcgcatggctagcagttgtaatgacaaatcattccttcttatcatcaatacctcaaattttattaatgctattaggatctactttaattatgggtggcgcatgtgcgttaaataattattacgaccaagatattgatcgtattatgcctagtaaacaaaatagaccaactgtaaacaatagaattacagatcaaaatttattactattaagttttggtatgatgttagttggagaaatttgtttgtttttattgaatataccatcaggcgtacttggtcttatggggattgtaggttatgtgtcttattactcaatatggtctaaaagacatacaacatggaacacagtgattgggagttttcctggagcagtaccaccactaattggatgggttgcaattgaaggacaaattagtttaacagcgattgcgctgtttttagttgtattttgttggcaaccaattcatttttatgccttagctattaaacgtaaagatgaatatgcacttgaaaatattccaatgttaccatcagttaagggctttaaacgtacacgtgtcagtatgtttatctggttgattattttattgccagtacctttattactaataaatttaggtgtcgtattcgtagtgttagctacattattaaatttaggatggattgcattaggtttaacaacatttaagaaaaattcagatcaaacaaaatgggcaacacaaatgtttatatattcactaaattatttagtgatctttttcgtgttagctgtgattgtttcattacttactttgatctagattaattaagttaggatgaaaaatatgggcgttccaattttaccaacgattagtacgacatgtattgtcattagtgcaattttaattgccattggttggagacttatttggaaaagggaaataaataaacacaaaaatgttatgttagctgcagctgtttttgctttaacttttttcttaatctatgcaagtagaacgatatttatcggtaatacagcatttggcggaccagcatcaattaagaaatattacacgattttcttatttttccacattaatttagcaacaattggtggtattctgggtctagttcaaattattacagcatttaaagataaatataatgtacaccgcaaattcgggccattcgcttcagttatatggttctgtactgcaattacaggtgtagcagtttacttattattatacgtattatatccaggtggagaaacgacatcactgattaaagcaacatttggtcattaatacgcttatacaaatgatactaatctgataaggcaatttgttttatcaggttttttgatgaagaatagtcggacagttgatggtattcatttgataccttaactgtccgtttttttatacatattttaatcctaataatgaaattcaacctgaaaacataaagataggttatgatatagagggtagggaaaatctttacgatgttaacattatgcctgaagatgattttgttttatcgaaatgacacagttatgtcagtgttgaaaatttgctaattaatgtgttgttttttacaatagtattaatactttttaggtggttgattgatgaaaaagttaattataagagtcgtcggtgtattatttttagttggatttttaatatatcttttttattcaccgagattaaaatttgatgtattagagaacccgaataaaggtaataaagtaaatagatctgaacaggtgaataaatcaaataaccatgctgaaaatccaaagcctaaagaaggtgttggtacatgggtaggtaaagatattaaagtgcttacttctaaatttggacaagcagatcgtgtctatccttttagagatggttacaaaaattatgtgtttaaagacaaaaacagttattacattgtttcaactaaacgtgaagaaatcgtttcagtgtatgctacaggtgaaaaagtaaatgttagtccgttaaaaataggacaacattctgcagaaatttttaatcatacaagtattaatccagaaccgtcctttaaagttgatggtaaaaaatatgaatttgaactttcagatgaagatttaaaaacacaaacactgattaaatatggcaacatatatgcacaagtgtattctgatcaacaatcgaaaaaggtactaagtgtacgatttttaacaaaagaaatgttagcagatattgaaccttatcgattaaattctaattctacgtcagaagagcataataagcgtccagttgagcaaaatccaaatcaattaatttctctttatgaagtaacgaatgaaatgagaaaattaaaaggattaaaaccattgaaaatcaatagcgatttagcacatattgcatctaataacttatatgaagcgacctctaatggttctgatagtgttgaatttacagaggacgcattaagagggcaattagataaaaatcacgttacttataaaacaactgctcaaaatgttggttatgcgtttaatgatgtaccaacattaatccatagttggatgaattcagatatacatcgatctcgcctattaaattcaaaatacgatgagatgggtggagatgtaatgagagattattattcactaattttcttagaaaaataacaatgaggggtatttatgattaatgaagcttcactagcgatattagatgatattgatgaactagctgatatgatagttgcatcagatatttatgcatcatttgagcaagctaaacaggcgctcgaaaacaatgacgaagcccatttactttatcaatcatttttaaaatcaaaagagaaatatgatgaagtaatgcgtttcgggaaatatcatcctgattataagaaagtcatgttagagacaagacaacgcaaaagagcatatgagatgcttgacgttgtgatgcattacaaagctagagaaatggcgcttcaacatttaattgatgaagttgttacgaaaattgcgtacgctgtttcagaacatgtcaaaatagaaacaggtaatccattctttcaaacatcgcatagtggttgtgcgacgggcggatcctgtaattgttcattataaaaaacatcgagtcagaaaaagttggttattggaaccactaactagcatctgactcgatgtttttgtttattgtttgttctttattgtttgtttgaattgttgtgctaaatctggtcgatctgtcacaatcgtatgtgcacctttttggtataaatcattcatcagatttatactatttacgccataatagcctggaatgatattcatatcatttaaccatttgataaaacgagatgaagtcaaattaatacctttaaaatgaggtaggcatttggaacgtttgtgctaatggttggtagtacctaccacctaataaatgatattttaaaaaatgcctctgtaacttcctgttggctagcaccaattgcaacagatccttgtgcaattttattaaaacgtacgatttgttctttataaaaacttgtcacaagaacacggtcaaatgcttgattctctgcaattgtatcaaacataatttgtggtgcgattgagccttcataggattcaggagcatcttttaagtctacgtttatatacatatcaggatattgcttcagcaactcatcgaaggttagtatagctgtgtgtgcatgaccacgatatggtgttagtccattgatatctttgaagtgataacctgcgtctaatttttttaattctgctaatgtatgggcactaacttttccagagccgttcgtcgttctatcaacagttgcgtcatgaaaaacgataagctgttgatcttttgtgagtctcacatctgtttcaaagccatcaacgcctaattgtttagcatagtcaaatgcaagttgcgtttgctctggtcttaaagtcataccaccgcgatgtgcaaatatatatggtgcattgcctttgaaaaaatcagggatggtttgctttttagtaatcactttatttttagttatcattaacaaactacttacaaatccagcaccgactagtactgcatttaaaatgtttctgtttaattttttcataaaaaattcctcctcgtttacttttatagcttaacaaattcatagttctgactacagcaaaatgtgtggttaatcatatagtgttgctcttgagaattgaattaatataatgatgcttaatataatctaaatacatttatcgtgtaattacataagacataattaaggtagcttaatattttaaaattaataaagacatgatatgattaatgctgaaaataaatggagtgaggtttaaatgaatttaatcccaagaactagtattgtagtttatttaaaacatatgaaacatgaacgacaaatccgaaaatatggacatatcgttcattcaaatagagatcgtaaatttgtaattatgtatgtgaatgagcaagatgttgatcaaattgtacataaactaatgcaacttaaatacgttagacacattgatggctcaccatataaatacttaaagaaaacttacgaaaaagagaaacacgaaatatataattaatattattgaagttctggtatccatttttggagccttaacacactaattaaataattataatataacgataaatcatgaaatgcttgaggaggctgtacatcgatacctaaaataggtatgtcgaatttttcagcacaatcattaatcatttgaaactttttatttgaatctggatatggatatttaatagcgttaatcatgatataaaatgcttggaaatgattgccagttgtagggttcataatgattgctacagatgactttttattttcagcttgtggtgaatgaaaatagataattttatcaatacgttgatggttatattcaatcatcgtcatgaattcgaacaaatctgttagaccttcaccaagtgtaataaatgtttgtttcattggtttatcattctcctttttctcaataaattatattaaataactaaatgaattggaagtgtgaacaacatgcgcgtcattgcaggtaaacataaaagtaaagctttagaaagtatggaaggccgtaatacgagaccaactatggataaagttaaagaaggtatctttaatagtttatatgatgtgtcaggtataggtttagatttatttgcaggaagcggggcgcttggaatagaagcactctctcgaggtatggataaggttatctttgttgatcaaaattttaaagctgtaaaagttattaaatcaaatcttgcgaatttgaatttagaggcacaatctgaagtttataaaaataatgcagatagagctttaaaagcattgtcaaaacgtgatattcaatttgatgtcattttcttagatccgccatataataaaggtctcattgataaagctttaaaactaatttcagagtttaatttattgaaagaaaatggtatcatcgtttgtgaatttagcaatcatgaagaaatagactatcaaccgtttaatatgattaaacgttaccattatgggttgacagacacattgttattagaaaagggagaatagcatggaacatacaatagcggtcattccgggtagttttgaccccattacttatggtcatttagacataattgagagaagtacagatagatttgatgaaattcatgtctgtgttcttaaaaatagtaaaaaagaaggtacgtttagtttagaagagcgtatggatttaattgaacaatctgttaaacatttacctaatgtcaaggttcatcaatttagtggtttactagtcgattattgtgaacaagtaggagctaaaacaatcatacgtggtttaagagcagtcagtgattttgaatatgaattacgcttaacttcaatgaataaaaagttgaacaatgaaattgaaacgttatatatgatgtctagtactaattattcatttataagttcaagtattgttaaagaagttgcagcttatcgagcagatatttctgaattcgttccaccttatgttgaaaaggcattgaagaagaaatttaagtaataaaaataacagtattttaggtttatcatggtttacaatcctaaaatactgttttcatttgttaacaatattgctgtatgacaggcgtgttgaaatctgtttgttgttgcccgcttattgcattgtatatgtgtgttgctttgatttcatttgtgaagtaatgtgcattacttttgttaatattggttatatattgtctttctgggaacgctgtttttaaatgctttaaatattgtctgccacggtcgttcatcgccaatactttaactgcgtgaatgtttctcgtaacatctgtaggtttaatgtttaataatatattcattaacagtctttgaatatgcgtatatgtataacgctttgtttttagtgattttacaaaatgatgaaaatcagttgcttcattaatgttagattttaaacgattttcaaaaccttcagtaacagtataaatattctttaatgactctgtagtcatagctatgatttgatatttcaaatatgggaatatttgatttaatgttatatgaggtgttacgtacaggtgttgaatatctttaggtactacatgatgccaatgatcatcttgactaatgattgatgttctaatagatgtaccacttgcatactgatggtgttgaattaatgaatcatgatgttgagcattttctcgtttaatagaaattgcattgatgtttttagcatgtttagcaattgctttcagataactaataccaagtatgttgttaggacttgctagtgcttcatgatgctctaataattcgctaatgatacgagggtagcttttaccttcttttactttttgtgaaaaggattcggattgttcaatttcattaatgctgtgagctaattgttttaatgttttgatatcattattttcactaccaaatgcaattgtatcgacactcatataatctgcgactttaactgctagttcggcaaaatgatcgccagatgataaactggcagttgctggtagttctataactaaatcagctgttgataatgccatttttgcacgagtaaacttattatagattgctggttcgccacgcatgacaaagttaccactcattattgcaatagtaacgtcagcatttgtaagttttttagattgattaatatgatattgatgcccattatgaaagggattatattctgtgattaagccaacgcttttcatttgcaattcgtcctttcggtattcattattaatattgtaacagaacatgatatgttaagaaaaaatcttgacaacttgttcttagaaagttaaaataaattttgtgcttgttagaggtgaagccatatgaaatggtcaattacgcaattaaggaaatatcaaggtaagccatttgaatttgatcaaacggtgagttttgacaatttaaaagaatcattagatttaattgatttatctccaattgcaatccaaggtcagttaaccattaagtcaacagaagtcgttgcggatattcacattactggaacgtatacaatgccttgtgcacgtactcttgtaccagttaaagtcccactagatgtaactactacagaagtatttgatttagaagggtacaatcagtataacgatggtcaagatgatgtagatgaacactatcacattattaacgatggtatggttaatcttcaggatattgtcgaggatatagttattattgagaaaccaatgagagcttattcagagcaaagtgaccaaatgttgacagtaggtaatggttgggaagtaatcgatgaggatcaattagatgagcttgctaaacagcaagaacaagatgattcagaatcacgacaagttgatccaaggcttcaaaaattacaacaattatatgataaagagcaataagtagtttaattaatgatataatgttgttaattaaactaacatttagtatttttcgtttataatctaaggaggatatatcatggcagtaccaaaaagaagaacttctaaaactagaaaaaacaaacgtcgtacgcatttcaaaatttcagtaccaggtatgactgaatgcccaaactgtggcgaatacaaattatcacaccgtgtatgtaaaaactgtggttcttacaatggtgaagaagtagcagctaaataattttagttactcaatataaaaagtcccgcttaaaataattgttttaagtgggactttttatattgcaaaaaataattggcggacgaggtatcggaatacctcatctgccaattaaaatttgttaatttaataattaaatataaagacgattaattagtttttacgttttctaggtaatacgaatgcaacgatactacttaaagctaataatgccattaatggtaatgtcatatctttatttgattcttcaccagtttgtggtaatgattttgctttattttcttgtgtatttttattgttttggctttgagtgtctccatcatttgtgtttttaatgtttgctttttgtaatggagcactatcttttgcttcgctagaacctgctgaagtttgaacaacatcttttgttgtttctgatgaagcagttgttggttttgcaacattttgagtcgtagatactaccttagttggagttgtactacttgattctacttcagctttagctggttttgtagcaggcgttttgtctttagctgactcactagatgcgtcattttctttttcaacacttgctgattgtttattgtcatctttttggctgtcttgtttttgtgattctttttcaacaggtggtgttgttggtttgctaggcgtagctggagtagtttccttcttagctgagttgtcttgttgttcctttttattagatttatcggcattggcttttgtaaatgcttctttatcaacgattctgacatggtattgtccatcataatcaatcgtttttacgtgaactttaacgatagcatcatatagagttttaccttcaacatatgggaaaataatcgttctagtgttatttttagcatctttgctaattgttctaacacgttgaccttcaaccatgaaatctttccagtaatcgtcattagtagtttccattaccatatattttttgccgttaagcatacctgttttaatagggtgtttaacaaaagtatccatcatagattcgttattctcaacactttcataaacaacatattttgtatcttgtaaatcggtcattttttcatttgttggttgtacattttggaattcagttatcgcggatttcacttgttcatctaaagcttttttcgtctcttctaatttcttcttgtattcagctttcaatttttcaggaagtttatcttgaattttatttaattcataaacttgtctttctagtgttttcgcttttttatatggcgctaataatttttcagctttataatcttcttcagttttgaatttatctgcactgttataaattggttgtgcgaattccattaatgtgtaatcgtatttttcttctttgttattgaagtgagttgaacttacgattttaactgcttttgttccatttgaaacagagaagcgaatgtaagcataatctttaacagtatcgtatgatactaatttaattggcaactttttgtcaccttcataaacttcaaattttctccaaaattgccctgattgtaaacctaattctatttctggttttgaatcagtgaaaataactctagctggtttaacagagcttgcataatgataaaattgttgagtgccatctttctttttcatttcaaaatcaattggacgagagtttggtgcgctatgatctttatcttttattgctgggtttttaatcgcttctcttagttcctgattcaaaataggatatgtattgttgtcagcttttgctgcaggtttttcctcttttgcttccttaggggctttaacttctttaacttcttttgtttcagtagtaggggccacaacttctttattagctactgagacagcattagctactggtttagcttctggagctttttcagttgttgttgttgttggacttgcaactgcttcagtttttggttgtgcttctgtatttgtaccacctgtttcttcagctgcttttgcttcgccatttgacattaataataaaagtgtactaatcgctacagatgcaacgcctagtgatgactttctaattgaataaaatgatttaaattctttttgctgtttgttcatgttgtagaaacaactcctaattgtatattatcaactgataatcattatcaattgattacttgtattgtacattgaaatggtagttaattgcaacgttattttataaaaaaataacctatgttatagattatggaatatctataacataggttaaataaaatttaaaataaaaaatatattaagttatgagtgtgacgaagatttatttagattcttttcttttgaaaagtaacaaagataatgaacctaaaagggcaagtgttgcgaaggcaactgtgctaataaagttatcaactgaagttaaaccagtttttggtaattctttagctttagaatcttttgaaggtccttgtttatgaacttcgttttgttttgtaactttgttagtttgttgtgatttattgtcacttacagcttgattgttgctttcagatttcgctgttgcaacatctttaacaggtgtttgaactttattttgttcttgagctgtttgtgttgttttcactgtacgagcactttgtgtttgactttgatcttttgtagcttcagtacttacaacttttgtagtttgtgtgttttcagctttgcttggtgcagttacagcaggcttaactttttcaactttaggttgaactggtttcgtttgctcagtaggtgttttaggttgaccaggttttggttgaaccggtttaacattgtttggttttgctgcgtcagctaatgtaggaattgctttttcaaattctaaatgcgtagtatatctatgattgtaattaatttgaggtacgacaatatgtacttttgtagttaaactcttatacccaggttcaacagcaacgttgattgttctagtgtcagcttttttatcatcgttaacaacagttgttgctaattcttgattgtttgcattgtaaaatttgtattctttccagaatgatgcgttgttcaatacagcttggaaataatatttattattttgtttaattactttaccagggtgttgcatatagtcatccatgtgtgacttctctgaagagccatctttttgcacttggaaattaattggttgtgatgttgcttgagaaacttgtgtgctttgattattagttgcgttcgtagcttctgttgccgcattaacttgttggctgtctgcgcctatgtatacaagggaacctaaaatgatagatgctgtacccattgtaatctttttcatagctgatgaacgttgttctgattgatacttactgtttaaataatgttttgtcatgttgttttcctcctaaggatacaaattatgtgttgttatatgagatgattaaccattgcaattgataatggttatcaattatactagcacatctattttcgtataacaataataaattgattataaaataaatattgacaatgataatcattattatttatgattttagtaaagacttaaaagcaatcataaaaaggaggattatattgtgaaaaatattttaaaagtttttaatacaatgattttagcgttaattatcatcatcgcgacattcagtaattctgcaaatgccgcagatagcggtactttgaattatgaggtttacaaatacaataccaatgacacgtcgattgctaatgactattttaataaaccggcaaagtacattaagaaaaatggtaaattgtatgttcaaataactgtaaaccacagtcattggattacaggaatgagtatagaaggacataaagaaaaaattattagtaaaaatactgccaaagatgaacgaacttctgaatttgaagtaagtaagctaaacggtaaaatagatgggaaaattgatgtttatatcgatgaaaaagtgaacggaaaacctttcaaatatgaccatcattacaatattacatataaatttaatggaccaactgatgtagcaggtgctaatgcaccaggtaaagatgataaaaattctgcttcaggtagtgacaaaggatctgatggagcgactactggtcaaagtgaatctaacagttcgaataaagacaaagtagaaaatccacaaacaaatgctggtacacctgcatatatatatgcaataccagttgcatccttagcattattaatcgcaatcacattgtttgttagaaaaaaatctaaaggcaatgtggaacaatgagaaatgttaaacaaattgctacaaaatctattatagctattattagcttaggtatgcttacatatacaacaatgattggtagcgtgttggctgatgagataaactatccatcagccaaatttaatcaacctgaagcaaaagataaaacagaattaacttcatcaatttttgatgaaaagataaaagagaataaagcgttagaattactaatttttaatcaagaaaataaaaatgtaactgaggaacaacaattagttgatgaaaaggcgcaattgatttcagatatgactggtaaaatttacttgcaagtaaaactaaaaggtcaaattgataaagagcaacttgtttttcaaaatgacaaaaatgaagaatttccttttgttataaaagatgaaaaggattatacgatagtaagaattttaattgaacatcatatggataaaatcaatatgcatgttaaaacgttgactgaaaagaaagatctagataacaaagaaatggtgtattctattcattttaaagagaaaaaagtacaacataatgatgcaaaagaagtgccttcaaaacatcaaaatcaagaaaataatcaagatcagcttaaaaaagatattgatgacaaaaaagatagtcaaaaatcagacattaaggaaagacgtactagcctttttactgaaaaaggattaaatgatattcctgtacaaaaagataaagtgcaacaagacagtgataaaaagattgaaaatgagcgacctaaagcatcaggtacattaaaagttgaaaatagccctccaacagtaaaaaaggttgaaaataatcacaaagagcaaccgaaacataaagatgaaaaatcaaaaaaggaaaagaaaaaagtagttgaaaaagaaaaagcgttaccagcttttaatagagatgatgatagcaagaatagtagtcaattatctagtgatattaaagaacttgatgaaccaaatcataaaaagcaatatatgttatttgcagctggcattgtgttagcaaccattttacttatttcggcacatttatacagcagaaagagaggtaaccaagtttgagaatcataaagtatttaaccattttagtgataagcgtcgttatcttaactagctgtcaatcttccagttctcaagaatcaactaaatccggcgaattcagaatcgtaccaacaactgttgcattgacaatgacattggacaaattggatttaccaattgtcggcaaacccacgtcatataagacattgcctaatcgttataaagatgtaccggaaattggtcaaccaatggagccgaatgttgaagctgttaaaaagttaaaaccaacacatgttttgagtgtgtcaacgattaaagatgaaatgcaaccattttacaaacaattaaatatgaaaggttacttttatgattttgatagtttaaaagggatgcaaaagtcgattacacaattaggtgatcaatttaatcgtaaagcacaagcaaaagaattaaatgaccatttaaattctgtaaagcaaaaaattgaaaataaagcagctaaacaaaagaaacatcccaaagtattaatattaatgggtgtacctggtagctatttagtagcaactgataaatcatatattggtgatttagttaaaatagcaggtggagaaaatgttattaaagtgaaagatcgtcaatatatttcgtctaatactgaaaatttgttgaatatcaatccagatattattttacgattacctcacggaatgcctgaagaagttaagaaaatgtttcaaaaagaatttaaacaaaatgatatttggaaacattttaaagctgtgaaaaataatcatgtttatgacttagaggaagtgccattcggtattacagcaaatgttgatgctgataaggcaatgactcaattatatgatttattttataaggataaaaaatagtgagttgatatgatgataaaaaataaaaagaaactactatttttatgtttgttagtcattttaatcgcaacggcttatatttcgtttgtaaccggtacaattaaattgtcatttaatgacctatttacaaaatttacaactggtagcaatgaagcagtggattcaattattgatttgcgattgccacgtatattaattgcattgatggttggcgcaatgttagcagtttctggagcattattacaagcagcactacaaaatcctttggcagaggcgaatatcattggcgtttcatcaggtgcacttataatgagagcactttgtatgttgtttattccacaattgtacttttacttaccattattaagttttattggaggtttaataccatttttaataattatattgttgcattctaaatttagattcaatgctgttagtatgatattagtaggtgttgcgttattcgtattattaaatggtgttttagaaattttaactcaaaaccctttaatgaaaattcctcaaggcttaacaatgaaaatatggagcgacgtatacatattagcagtatcagcattattgggattaatattaacattactattgtcccctaaattgaatttactaaatttagatgacgtacaagcgcgaagcatcggttttaatattgatcgttacagatggttaacaggtttattagctgtatttttagcaagtgcaactgttgcgattgttggacaactagcctttttaggtattattgtgccacatgtggttagaaagctagttgggggcaattacagagtacttattccgttttctacagttattggtgcatggctattgttagtggctgatttattaggacgagtgatacagcctcctttagaaattccagccaatgctattttaatgattgtcggtggtccaatgctaatttacttaatttgtcaaagtcaacgaaatcgaatctaaaacggtacaacaactggtttagtgatgactgaagaaacgtcgttaataaaagaggatttttatgagaatgaaacgatttttaactattgtacaaattttattggttgtaattattatcatttttggttacaaaattgttcaaacatatattgaagacaagcaagaacgcgcaaattatgagaaattacaacaaaaatttcaaatgctgatgagcaaacatcaagcacatgtgagaccacaatttgaatcacttgaaaaaataaataaagacattgttggatggataaaattatcaggaacatcattaaattatccagtactacaaggtaagacaaatcacgattatttaaatttagattttgagcgagaacatcgacgtaaaggtagtatttttatggattttagaaatgaattgaagaatttaaatcataatactattttatacgggcaccatgtcggtgataatacgatgtttgatgtgttagaagattatttaaagcaatcgttttatgaaaaacacaagataattgaatttgacaataaatatggtaaatatcaattgcaagtatttagtgcatataaaactactactaaagataattacatacgtacagattttgaaaatgatcaagattatcaacaatttttagatgagacaaaacgtaaatctatgattaattcagatgttaatgtaacggtaaaagataaaataatgactttatcaacgtgcgaagatgcatatagtgaaacaacgaaaagaattgttgttgtcgcaaaaataattaaggtaagttaaacagaaaagaggataattatgaaatttatggcagaaaataggctgacgttaataaaaggaacagcaaaagatattatagaacgattttacacgagacatgggattgaaacattagaaggctttgatggcatgtttgttacacaaactttagaacaagaagattttgatgaagtgaaaattttaacagtttggaaatcaaagcaagcttttacggattggttaaaatctgatgtctttaaagcagcgcataaacatgttagaagtaaaaatgaagatgaaagtagcccgattatcaataacaaagtaattacatatgatataggctatagttacatgaaataattgaatttaaagaggttgcagtacttgttatgacaattggtattgttaactttagtaacgaccatacatgatatcgatgatggtcgtttttttaatgaacacaaacatgctaacaacaaattgctaaaacgtagtttgatatgaatgtgctttgaaattaatcatcaaatatatgattttgatttattttgaagaagaaaagaattaataatgatatttcggagcgtatgatttatagtagtagtatcgataaaagaaatttatacaatttgaaataatatgagtgataaaatcgattaattaatattaactatacaatcaaatgttttcatcttattaatgattaatatttttatttttaaaaataaagcgaggagctatctatggaacaaattacttctgcacaaaataatagaattaaacaagcgaacaagctaaaaaagaaacgtgagagggataaaactggtttagctttaattgaaggtgtgcatttaattgaagaagcttatcaacgtgggattgtaattacacaattatttgcaattgaaccggcaagattagatcagcaaattatcgcatacgcgcaagaagtttttgaaataaacatgaaagttgctgaatctttatcaggtacagtgacaccacaagggtttttcgcaatcattgagaagccacaatatgatatttctaaagcacaacaagtattgcttatcgatcgtgttcaagatcctggaaatttaggcacgttaattagaactgcggatgctgctggaatggatgctgtaataatggagaagggtacgacagatccttatcaagataaagtgttgcgagcgagtcaaggtagtgttttccatttgccagttatgacacaagatctcgatacgtttattactcaatttaatggtcctgtttatggtacagcacttgaaaacgcagtggcatataaagaagttacttcaagtgattcttttgcattactattaggtaatgagggagaaggtgttaatcctgaattattagcacatactacacaaaatttaatcatacctatttatggtaaagctgaaagtttaaatgtagcgattgcaggtagtattttactttatcatttgaaaggttgaccgtgttgaaagttttccgatataattataattaattgtttaacagaacatttctacgtgattgcatacacaattgaatataaaccaataaaaaggcatggacatttatataaataattgttttagggagaataatcgtgactgcaagttattccaattatttaaagtcttttcacctttttggttacttaaagagatttaagtcggaaagacaatccgttatcaatattaaacaagtgtatgcttaggcataaatttgggtggtaccacggaaatgactttcgtcccttattttttaagaggatgaaagtctttttttagttaaacaacaaatatgataaatagaaaatgaatagttcgaatagggaggtcagtgacatatgtctgaacaacaaacaatgtcagagttaaaacaacaagcgcttgtagatattaatgaagcaaatgatgaacgtgcactgcaagaagttaaagtgaaatacttaggtaaaaaagggtcagttagcggactaatgaaattgatgaaggatttgccgaatgaagagaaacctgcgtttggtcaaaaagtgaatgaattgcgtcaaacaattcaaaatgaattagatgaaagacaacagatgttagttaaagaaaaattaaataagcaattggctgaagaaacaattgatgtatcattaccaggtcgtcatattgaaatcggttcaaagcatccattaacacgtacaatagaagaaattgaagacttattcttaggtttaggttatgaaattgtcaatggatatgaagttgaacaagatcattataacttcgaaatgctgaatttacctaaatcacaccctgcacgtgatatgcaagatagtttctatattacggatgaaattttattacgtacgcatacatcaccagtgcaagcacgtacgatggaatcacgtcatggtcaaggtccagttaaaattatttgccctggtaaagtgtatcgtcgtgactctgatgatgcgacacatagtcatcaatttacacaaattgaaggattagttgttgataaaaacgttaaaatgagtgatttgaaaggtactttagaattgttagctaagaaattatttggtgctgatcgtgaaattcgtttacgtccaagttacttcccattcactgaaccttctgtagaagttgatgtgtcatgttttaaatgtaaaggaaaaggttgtaatgtgtgtaaacacacaggatggattgagattttaggtgctggaatggtacatcctaatgtattagaaatggctggttttgattcttcagagtactctggatttgcatttggtatgggaccagaccgtattgcaatgttgaaatatggtatagaagatattcgtcatttctatactaatgatgtgagatttttagatcaatttaaagcggtagaagatagaggtgacatgtaatgttgatatcaaatgaatggttgaaagaatatgtaacaatcgatgattctgtaagtaatttggcagaacgtattacgcgcacaggtattgaagtggatgatttaattgactacacaaaagatatcaaaaatttagttgttggcttcgttaagtcaaaagagaaacatcctgatgctgataaattaaatgtttgccaagttgatatcggagaagacgaacctgtacaaatcgtatgtggtgcaccgaacgttgatgcaggacaatatgtcattgttgctaaagtaggtggcagattgcctggtggtattaaaattaagcgtgctaaattacgcggtgaacgttcagaaggtatgatttgttcgttacaagaaattggtatttcaagtaactatataccgaaaagttttgaatcaggcatttatgtatttagtgaatcccaagttccaggaacagatgccttacaagctttatatttagacgatcaagtaatggaatttgatttaacgccgaatcgtgctgatgctttaagtatgataggtactgcttatgaagttgcagcattatataatacaaaaatgactaagccagagacaacatcaaatgagcttgagttatctgcaaatgatgaactgactgtgacaattgaaaatgaagataaagtaccatattatagtgcacgtgttgttcacgacgtgacaattgaaccttcgccaatttggatgcaagcacgcttaataaaagcaggtatacgtcctattaataatgttgtcgacatctcaaattatgtgttattagaatacggtcaaccattgcacatgtttgatcaagatgcgattggttcacaacaaattgttgttcgtcaagctaatgaaggcgaaaaaatgacaacattagatgatacagaacgtgaattattaacgagcgatattgtcattactaatggacaaactccaattgcattagctggtgttatgggtggtgatttttcagaagttaaagaacatacatcaaatatagttattgaaggtgctatttttgatccagtttcaattcgtcatacatcaagacgtttaaatttacgcagtgaatcatctagtcgttttgaaaaaggaatagctactgaatttgtagatgaagcagtcgaccgtgcatgttatttattacaaacttatgcaaacggaaaagtgctaaaagatagagtgtcttcaggagaacttagtgcatttattacaccaatcgacatcactgctgataaaattaatcgcacaattggatttgatttgtcacaaaatgatattgttactatttttaatcaattagggtttgatacagaaataaatgatgatgttattacagtgcaagtgccgtcacgtcgcaaagatattacaattaaagaagatttaattgaagaagttgcacgtatttatggttacgatgatattccttcaacattacctgtcttcgaaaaagttactagtggtcagttaactgatcgccaatataaaacgagaatggttaaagaagtgttagaaggtgctggattagaccaagctattacgtattcgttagtttctaaagaagatgctactgcatttgcgatgcaacagcgtcaaacaattgatttattgatgccaatgagtgaagcgcatgcgtcattacgtcaaagtttattaccacatttaatcgaagcggcatcatataatgtggcacgtaaaaataaagatgtaaaattatttgaaatcggcaatgtcttctttgctaatggtgaaggtgaactaccagatcaagttgaatatttaagtggtattttaactggagattatgtagtcaatcaatggcaaggtaagaaagaaacagttgatttttatttagcaaaaggtgtcgtggatcgagtatctgaaaagttaaaccttgaatttagttatcgtcgtgctgatattgatggattgcatccaggtcgtacagctgaaatcttattagagaataaagttgttggttttattggtgaattacacccaacattagcagctgataatgatttaaaacgtacgtatgtttttgagttgaattttgatgcattaatggctgtgtcggtaggttacattaattaccagccaattccgagattcccaggcatgtctcgtgacattgcattagaagtaaatcaaaatattccagcagctgatttattatcaacgattcatgcacacggtggcaatatattaaaagatacacttgtctttgatgtatatcagggcgaacatttagaaaaaggtaaaaaatcaattgcaatacgtttaaattatttagacacagaagaaacattgacagatgaacgcgtttcaaaagtacaagcggaaattgaagcagctttaattgaacaaggtgctgttattagataatgatttaaaccccatgtataaggatatctgaagtagattgatatccctaacatggggttttatttttggattcaccaattaggttccgattcattttataaatcaaagaggcacagtggattacagttgatgcttcgcacaactgcatataaagtcatacttatgagcaaagcaaattagtatgacttacctaataggatttcgtattaggatccaatttatcttgattaaaaatcaaagaggcacagcggattacagttgatgctttgcacaactgcatataaagtcatacttatgagcaaagcaaattagtatgacttacctaataggatttcctattaggatccatttcatttataaatcatagaggctttaaaattttttgggctttttcacgatttttgaaatgtttttttgaaatggaatctaaacgtgaaagaccgtatttttttataattttggcggcgattacatcgactttagcaccggcacctttaggaatcgtcatattaatattttttgatatttgatccatatatgtaacaaatgcgtatctagaaattatgcttgccactgcaatggctaatgacttcgattctccttttgtttcaaattttgttttctttggaagtggtatatcggataatgcgtaatggctatacacttcgcgttttgcgaactgatcaatgacgatataatctaattgagacgaatcaattttttcaagtacatttttgatggcttcattatgaagaacagctttcatttttacttgagtccagccttttgcttgctgaatattatatttttcattgtgtagtgttaatagtgaatgtggaatgaaagtaaccaattgctcagcaagttctacaattttagtatcggttaatttttttgaatcatctacacccaaagtttttaaaatagggacatgctctttggtaacgaaagcagcacatacagtcaagggaccaaagtaatcgccacttccagcctcatcactaccaatacagttaaattgatcatacattaaagtctgttcaagagaagaattgtccgtatttttctttttagttttattagtattcaattgagaatgctgcggtagaagttcttgagacacagcttctgcatgattaccttgaaacatgactttacctgattggtaaatatttacagttgtattttgatactttgcacgtgctttcataccttgaggtaaattctcagtatcaaatgaaatgcgtgacattaatgtcgttatgtctttatctgacaatttaaaaacgatattcgccatttgtgtaaatcctttcatataatttcattatcattagcaaaaataatcatatcataaatgataataacgtcagaaacatttatatatgttgtaaagaattaattgcggatacttacaaaatacatagtggtcatgtataatgtttatgaaaatgttatagtgacacaatttaaacatgataaagtattgaatagaaaattctttacataatttcatttcattataaaaagaacattaagtcatctatagagattgtgttgttgttttatcataattgcaatataacaatattagtatcaaattcagacaaactattcagtcatattttataacgtgaatttagattttaaaaaaaggatcaggagaaattataaatggcacagtttaaaaacaaggtaaatgtatcaattaatgatcagctttttacaattgttggggaagataacccagagcacatacgatatgtagcacatttagttgatgataaaataaaagaattagggtataaagcagcaggtttagatacttcaagaaaagcaatactaactgctgtgaatattatgcatgaaaaagtactactagaagaagaaaatcgacgtttgaaacaacaaattcacaaattgcagcagcgtgagcaataaatgatcattgattttattataatcattttctttgtgtattttgtcatcgttggattcagacgaggtttttggttatctatgatacatttgagtgcaacgattgtatcattgtggattgccagtcaattttacaaatctattgtagaaagattaattgtatttattccatatcctaaaacaacagcatttaatacaacttttgcgtttcattttaatcatctacaacatcgatttgaagcgattgtagcttttttaatgattacattgttttgtaagttcattttatatctaattatcgtaacttttgataaaataatagcgtatcaaaacattcatattttcagtcgtgcaatgggaatgatagttggtgtgtttatgacgataattgtcttacactttacgttatatctattggcattatatcctaacgaagcattacaacatcagcttaaaatatctattgtgagtcattcattgatttttcacatcccatatttatcggctttcaccattaatttataaattatcataagaggtcaggacaaaggtatatattaatgatacgtcctggtcttctttttatggagtgttattatgacaaaaaaagatgttatcaaactattagaacaaattgctacttatatggaattaaaaggggaaaatacttttaaaatatcagcgtaccgaaaagcagctcaaagtcttgaattagatgaacgaccattagatgaaatatctgatgtaacggagttaaaaggcattggtaaaggtgttgcagaagtaatcaatgattaccgtgagaccggtgaatctcagtatttacagcaattacaggaagaagttccggaaggtcttattccacttttgaaaattcaaggacttggaagcaagaaaattgctaagctatataaagagttgaatattgttgataaagcgtcacttcaagttgcttgtgaaaatggaaaagttagtgaattaagcggatttgctaagaaaaccgaacaaaacattttagaagctgtgaaacaacttggtgctaagaaagatagatatccaattgatcaaatgagaagacttaatcaagaaatcattgattatatagatacattaaattatatcgatcaatattcatctgcaggaagtttccgtcgttttaaagaaatgagcaaagatttagatttcataataagcaccgataacccaaaagcagtgcagcaacaattattaaatattcccaataaagtaaaagaagttgcagtggggaacacaaaagtttcgttagaattagcgtatgatgatgaaacgattggggtcgattttcgattaattgaaccaagtgctttttatcatacattgcagcattttactgggtcaaaagaacataatataagaattcgacaacttgctaaagcacgtgatgaaaaagtaagtgaatatggaattgaacaagctgatggtacattaattcaatatgatagtgaagccaaaatatatgaacattttaatgtgaattttataccacctgctatgagagaagatggtagcgaatttgataaagatctaagtaatatcattacattagatgatattaatggtgatattcatatgcatacaacgtttagtgatggtgcgttttccattcgagacatggtagaagcaaatatcgcaaaaggttataaattcatggtaattactgatcattcacaaagtttacgtgtagctaatggcttacaagtagaaagacttttaagacaaaacgaagaaattaaagctttagataaagaatatagtgaaattgatatttattcaggtacagaaatggatatattacctgatggctcgctggattatgatgatgaaattttagcacaacttgattacgtaattggagctattcatcaaagctttaaccaatcagaagaacaaattatggaacgattagctaatgcatgtcgcaatccatacgtgcgacatatagcgcatccaacagggcgtattataggtagaagagatggttataaaccgaatattgaacaattaatggcattagctgaagaaacgaatacagtattagaaattaatgccaatccacatcgactggatttgagcgctgatatcgttcgtaaatatccaaatgtgaaattaactattaacactgatgcgcatcatacaaatcatttagattttatgcattatggtgtagcaactgcgcaaaaaggatttgtaacaaaagatagagtgattaacgcattatcgcgtgaagcttttaaagactttattgaaaataatataaaacttaagaaatagagggattttatgagacaaaaaacattagacgtcttagaatttgaaaaaataaaatcactcgttgccaatgaaactataagtgacttaggcttggaaaaggtcaatcaaatgatgccagctactaattttgaaacggttgtttttcaaatggaagaaacggatgagattgctcaaatctataataagcatcgtttaccaagcttgagtggcttatctaaagtatcagcattcattcatcgcgctgatattggcggcgttttaaatgtatcagagcttaacttgataaaaagattaattcaagtacaaaatcaatttaagacattttataatcaattggttgaagaagatgaaggtgttaaatacccaatattagatgacaagatgaatcaattacctgtgttaaccgatctttttcaacaaataaatgaaacatgcgatacgtatgatttatatgataatgcgagttatgaattgcaagggattagaagtaaaatttctagcacgaatcaacgtattagacaaaatttggaccgtattgttaaaagccaagcaaatcagaaaaaattatcagatgctattgtaacagttaggaatgaaagaaacgttatacctgtcaaagctgaatatcgacaagattttaatgggattgtacatgatcaatctgcttcaggacaaacattgtatattgagccatcatcagttgttgaaatgaataatcaaattagtcgattacgtcatgatgaagcaattgaaaaagaacgcattttaacgcaactaactggttatgttgctgcggacaaagatgcactacttgtggcagaacaagtcatgggtcagttagattttttaatcgcaaaagcgagatatagtagaagtattaaaggaacaaagccgatatttaaagaggaacgtactgtatatttacctaaagcataccatccattattaaatcgtgagactgttgtagctaataccatcgaatttatggaagatattgaaacggtaattattacaggaccgaatacaggtggtaaaacagtaacattaaaaacattaggtttaattattgttatggctcaatcaggattattgattccaacacttgatggtagtcagttaagtgtatttaaaaatgtatattgcgatatcggagatgaacaatcaatagaacaatcattatcaactttttcatctcatatgacgaatatagttgaaattttaaagcgtgcagacaaacatagtttagttttatttgatgaattaggtgcaggtacagatccaagtgaaggtgctgccttagcaatgagcattttagaccatgttagaaaaattggttctctagtaatggcaacgacgcactatcctgaacttaaagcatatagttataatcgagaaggcgttatgaatgcgagtgtagaatttgatgtagatacattaagcccaacttataaattgttaatgggagtaccaggtcgttccaatgcttttgatatttctaaaaagttaggtcttagtttgaacattataaataaggctaagacgatgattggtactgatgaaaaagaaataaatgaaatgattgagtcattagagcgtaattacaaacgtgtagagacacagaggttagaactggaccgtcttgtaaaagaagcggagcaagtgcatgatgatttatctaagcagtatcaacaattccaaaattatgaaaaatctctaattgaagatgctaaagaaaaagcgaatcaaaaaattaaagcagcaacaaaagaagctgacgatattattaaagacctaagacaattgcgtgaacaaaaaggtgcagatgttaaagaacatgaattgattgataagaagaaacgattagatgatcattatgaagcgaaatctataaagcaaaatgtacaaaagcaaaaatacgataaaattgttgctggtgatgaagtaaaagtattatcttacggtcaaaagggtgaagttttagaaattgtcaatgatgaagaagcaattgttcaaatgggaattattaaaatgaagttacctattgaagatttagagaaaaaacaaaaagaaaaagttaagccaacgaaaatggttacacgtcaaaatcgtcaaacaattaaaactgaacttgatttacgaggctatcgttatgaggatgctttaattgaactagatcaatatttagatcaagccgttttaagtaattacgaacaagtttatatcattcatggtaaaggtacaggtgcacttcaaaaaggtgtacaacaacatttgaaaaagcataaaagtgttagtgactttagagttggtatgccaagtgaaggtggatttggcgttaccgttgcaacactaaaataaattataatttgataaattaattagctgcagttaaaataatgtaaagcaacaagaatacatttcaaacatgttatttgaaataagcataaaaattgagcaaatagaaatacatgaagcatgttatctgatataatttgaacatcataataataattaaggaggattggcatttatggcaatcgttaaagtaacagatgcagatttcgattcaaaagtagaatctggtgtacaattagtagatttttgggcaacatggtgtggtccttgtaaaatgatcgctccggtattagaagaattagcagctgactatgaaggtaaagctgacattttaaaattagatgttgatgaaaatccatcaactgcagctaaatatgaagtgatgagtattccaacattaatcgtctttaaagacggtcaaccagttgataaagttgttggtttccaaccaaaagaaaacttagctgaagttttagataaacatttataagttacaaccaatgacgactggggcatttctttaatgaattgctccagtttttgtttgtgtttttaatatataaagttgaatgataagtcatcatattgtttacgacttgagaatggtgggattaataaatctaagaacgttaaatgataatcaagcatgctgatagacatgtagcagttggtttgataaaacaatgttcaatattacatgatgtgcatgaaaagtcatactcgaagatgctgattatgaactagaattagtggtgataaatttgaagcacttttgtagcatcattcattttaaaattagaaggggggatatttttggaagactataagcaacgaattaaaaataaattaaatgtcgtacctatggaaccaggctgctatttaatgaaagatcgtaatgatcaagtgatatatgttggcaaagctaaaaagctaagaaatcgattgcgatcatattttacgggtgctcatgatgctaaaacaacgagactggttggtgaaatacgtcgctttgagtttattgtcacgtcaagtgaaacagagtcacttttactggaattgaatctgattaaacaatatcaaccaagatataatattttattaaaagatgataaaagttatccatttattaaaataacaaaggaaaaatatcctagactactagtgacgagaactgtaaaacaaggtactggcaaatatttcggaccgtatccaaatgcatattctgctcaagaaactaaaaagttattagacagaatatatccatatcgcaaatgtgataagatgccagataaattatgtctttattaccatattggacaatgtttaggaccatgtgtatatgacgttgatttgagtaaatacgcacaaatgacgaaggaaattactgattttctgaatggggaagacaaaacaattttaaaaagtttagaagagcgaatgttaactgcaagtgaatcacttgattttgaacgggctaaagaatatagagatttaattcaacatattcaaaatctaactaacaaacaaaaaattatgtcatcagataaaacgattcgtgatgtctttggttatagtgttgataaaggatggatgtgtatccaagttttctttataagacaaggtaatatgataaaacgagatacaacgatgattccattacagcaaacagaagaagaagaattttatacatttattggacaattttatagcttaaaccaacatattttacctaaggaagttcatgtgccacgtaatttggataaagaaatgattcaatctgttgtggacactaaaatcgttcaacccgcgcgaggtcccaaaaaagagatggttgacctagctgcacataacgctaaagtatccttaaataataaatttgaattaatttcacgtgatgagtccagaacaattaaagcaattgaagaacttggaacacaaatgggaattcaaacaccaattagaattgaagcattcgataattctaatattcaaggtgtggatccagtgtcagcaatggttacatttatcgacggtaaaccagacaagaaaaattatagaaagtataaaatcaaaacggttaaaggtccagatgattacaaatcaatgagagaagtagtaagacgccgatactctcgcgttttaaacgaaggattaccattacctgatttaataatagtagatggtggtaaaggacatatgaacggggttattgatgtgctacaaaacgagttaggtcttgatatccctgttgcaggtttgcaaaaaaatgataaacaccaaacatctgaattattatatggcgctagtgcagaaattgtaccactgaagaaaaatagccaagcattttatttgttgcaccgtatccaagatgaggttcacagattcgcaatcacatttcatagacaaacacgtcaaaagacaggcttgaaatcaatccttgatgatatagatggtatcggtagcaaacgtaaaacattattattgcgttcattcggttcaatcaagaaaatgaaggaagctacacttgaagattttaaaaatataggtattcctgaaaacgtcgcaaagaacctacatgaacaattgcataaataaattactgggcgtgagaatcattctcatgccccaaaatatatgaaataatgttacaatatggttaacaaagttatttttttgaatgtacgtggaagcgttttctaaatgagaaagtttatcatcacaagcaatcttaaatatcgaatccaaatgttacattgttcgacatgcagtttggtgatcgtgcagtgtgtatttgtctttaaaatgtttcgcttaatgataatgacaacgctagaaacgatatcactttagggggttaagcgtacgtttaatataaatagctcaataaattaaatattcgttcacaggggggactccttttggctcaatcaaaaaatgaattttatctaagacgtattcattcgttattaggtattatcccaataggtgcatttttggtagttcatttattagtgaatcaccaagcaacacaaggtgctgaagcgtttaataaggcatctaactttatggaatcattaccatttctaattattgtagaatttttatttatatacattccgttgttatatcacggtttgtttggtatacacattgcatttacagcaaaagaaaatgttggacattactcgatttttagaaactggatgttcttcttccaaagagtgagtggtatcttaacattcatctttattggtatccatttatggcaaacacgtttacaaaaagcattttacggcaaagaagtgaattacgatttaatgcacgaaacattgcaacatcctggatgggcaatattttatattatttgtattattgctgttgtgttccattttgcaaatggcttatggtcattcttagttacttggggtggacttcaatctccaaaatcacaacgagtatttacatgggtttcattaatcgtattcttagttatttcgtatattggtgttacagcaattattgcctttatgtaatacatcgcatttaacaaaaatagattgaaaatttaggggagtgacatttttatggcagagaaacatcttattgttgtcggaggtggcctagcgggcttaatgtcaacaattaaagcggcagaaaaaggtgcacatgtagatttattctcggttgtaccagtaaaacgttcgcactctgtttgtgcccaaggtggcattaatggtgcggtcaatactaaaggggaaggcgattctccttggattcactttgatgatacagtgtatggtggcgacttccttgcaaaccaaccacctgttaaagcgatgacagaggcagcacctaaaattattcatttattagaccgtatgggcgtaatgttcaatagaacaaatgaaggtctactagattttagacgtttcggtggtacattacaccacagaacagcatatgcaggggcaacaactggacaacaattattatatgcattggatgaacaagttcgtgcatatgaggtagatggattagttacgaagtatgaaggatgggaattccttggcatagttaaaggtgacgatgatagtgcaagaggtatcgttgcacaaaatatgacaactgctgagattgaaacatttggttcagatgcagttattatggcaacgggtggccctggtatcatcttcggtaaaacaacaaactcaatgattaatacaggatcagcggcttccattgtttaccaacaaggcgctatttatgctaatggtgagttcattcaaattcatcctactgcaatccctggtgatgataaactacgactaatgagtgaatcagcacgtggtgaaggtggacgaatttggacatataaagatggtaagccttggtacttcttagaagagaaatatcctgattatggtaacttagtacctcgtgatatcgcaacgcgtgaaattttcgatgtatgtattaaccaaaaattaggtattaatggcgaaaacatggtatatcttgatttgtcacataaagatccacatgagttagatgtaaaactaggtggtatcattgaaatttatgaaaaattcactggtgatgacccacgcaaagtaccaatgaagattttcccagctgtccactattcaatgggtggtctatatgtagattatgatcaaatgacaaatattaaagggttatttgcagctggagaatgtgatttctctcaacatggtggtaaccgcttaggtgccaattcattgttatcagcgatttatggtggtacagtagcaggtccaaacgcgattcattatatttcaaatattgatcgatcatatactgatatggacgaaagtatttttgaaaaacgtaaagctgaagagcaagaacgttttgataaattattagctatgcgcggtacagaaaatgcatataaattacaccgtgaacttggtgaaattatgacagcaaatgtaactgttgttcgtgaaaatgaaaaactgttagaaacagataaaaagattgttgaattgatgaaacgctatgaagatattgatatggaagatactcaaacttggagtaaccaagcggtattctttactcgtcaattatggaacatgttagtacttgcacgtgttattacgattggtgcatataaccgtaacgaatcacgcggtgcccattataaaccagaattcccagagcgtaatgatgaagagtggttaaaaacgacaatggcctcattccaaggcgcatttgaaaaaccacagtttacttatgatgacgtcgatgtgagtttaataccacctcgtaaacgtgattacacaagtaagtctaaagggggtaaaaaataatgactgaacaatcagtgaaaaacactccacaacatgaaacacaatctaaaccgaaacaaaaaacagtaaaattaattattaaacgacaagatacaagtgattctaagccttatgaagaaacatttgaaattccatatcgtgaaaatttaaacgtcattgcatgtttaatggaaattagacgtaacccagttaatattaaaggtgaaaaaacaacacctgttgtctgggatatgaactgcttagaagaagtatgtggagcatgttctatggttatcaatggtcgtgcaagacaatcttgttctgcgattgttgatcaattagaacaacctattcgtttagagccaatgaatactttcccagttatccgtgacttacaagttgatcgttctagaatgttcgataacttaaaacgtatgaaagcatggatcccaattgatggaacatatgatttaggtccgggaccacgtatgccagagaaaaaacgtcaaacagcttatgaattatctaaatgtatgacatgtggtgtatgtttagaggtttgtcctaatgtaactgaaaataataaattcgttggtgcgcaagcaatctcgcaagttcgtttgtttaacttgcacccaacaggatctatgactaaagatgaacgtttaaatgcattaatgggtacaggtggcttacagcagtgtggtaattcacaaaactgtgttaatgcttgccctaaaggtattccattaacaacatccattgcagcaatgaacagagaaacaacattccacatgtttaaatcattctttggttcagaccatgaagtagaataaaaattaatcccttttgagttaaaatgttatgttcctttcaaaattaaattgaatggagatacacaataacttagaagggatttttttaataagcagattacatgacactatgatagtgggctgatttaaaacaagtattatattataatgacaaaaatggtaaacacagtgcataatactaaaatccaatgcttagttatgataaactaaaaattaaattaaaagtaaggatgaccgaatatgaataaaccaataggtgtaatagactctggtgtcggaggtttgacagtagctaaagaaattatgcgtcagttgccaaatgagacgatttattacttaggtgatattgggcgatgtccatatgggccaagaccaggagaacaagtaaaacaatatacagttgaaatcgctcgtaaattaatggaatttgatattaaaatgctcgtgattgcttgtaatactgcaactgctgtagctttagaatatttacaaaaaacattatcgattcctgttattggtgtaatagagccaggtgctaggactgcgattatgacaactagaaatcaaaatgtacttgtattaggtacggaaggtactattaagtctgaagcatatcgtacacatattaaacgtatcaatccacatgtagaggtacatggggtagcttgtccaggttttgtgccattagtagaacaaatgcgatacaatgatccgacgattacgagtatcgtcattcatcaaacattgaaacgatggagaaatagtaaagcagatacggttattttaggttgtacacactatccattgctctataaacctatctatgattattttggtggcaaaaagacagtgatttcgtcaggattagaaacagctcgtgaagttagtgcattgctaacatttagtaatgaacatgcaagttatactgaacatccagatcatcgattttttgcaacaggtgataccacacatattactaacattatcaaagagtggctaaatttatctgtcaatgtggaacgtatatcagtgaatgactaggaggatttttaatgaaagagattgttattgcatcgaataatcaaggaaaaataaatgattttaaagtgatatttccagattaccacgtaataggtatttcagaactaataccagattttgatgtggaagaaacaggatcaacatttgaagaaaatgctatattaaaatcagaagctgctgcaaaagcattgaataaaacggtcatagctgatgacagtggactagaagtttttgcattaaatggtgagccaggtatatactctgcacgttatgctggtgaaaataaaagcgatgaagcaaatattgaaaaattattaaataagcttggtaatacaactgatcgtcgtgcgcaatttgtttgtgtcataagtatgagtggccctgatatggaaacaaaagtatttaaaggtactgtttcaggtgaaattgcagatgggaaatatggcgaaaatggtttcggatatgatccgatattttatgtaccgaaattagatagaaccatggcgcaactttctaaagaacaaaaaggtcaaattagccatagacgaaatgcaattaatttattagaagcttatcttgcgggtgatcaaaatgtctaaatggattgttgtgagtgataaccatactgaatctggcattttataccaaatttacgaggcacacccagatgctgatatgtatttgcatttaggcgattcagaatttgagtatgatgatacagaacttagcttatttcgtagggtaaaaggcaattgtgatttttacccagaatttgaaaatgaagcggtcgcaaaatgtaatgacgtgaaagcattttacactcatggacatttatatcaagtcaatcgaacaagacatttattagctgagcaagcacgtgaattaggttgtgtatttgctttttatggacatacacatgttgcaaaatatgagtatattaatggtgttcatgttattaatcctggaagtatatctcaatctagaagttcaatggaagaatcgtatgcggaagttttgattgatgatcaaacattacaaggtacagtgaattttaaaaatcgacaacatgaaacaatcagtcatactactttttaaattaaaagtagctatggctctttttattttgcggcatgatttaactaggaggtcgtgacatgaatgtttgtttaaaagtgttgctgacaatttttagaaggtaactggaatgaataacacatttatgtaatgaaaagaattgtactttttgggaaagtgattgttgattgtcctatatggttgaatcatgttgattatttggttaaaagtgtattattaaaaagtataaaattaaaattccaagaagtcaggaaatttgaaattttagttaaaatcatgaatcgtatacatatttaaaaggatttctaaaggcataaattatatcaataatttggtggttaaaatatggagtagcaaaattcttgaaatttagaaatgtagtgacacaaatattaatgtttagttaataaatagttaatgtagttttttgcatctgtctattattataaatgtatacaaaataaatatttgaggataggtgttattaattatgaaaaagaattttattgggaaatcaattttaagcatagctgctattagtttaacggtatcaacatttgccggtgaatctcatgcacaaactaaggctgaaaaatataacgagtatcaaacaaactttaaaaaacaagtaaataaaaaagttgtggatgcacaaaaagctgtaaacttgttcaaacgtacaagaactgttgcaacacaccgtaaagcacaaagagctgttaacttaattcatttccagcacagctatgaaaagaaaaaattacaaagacaaatcgatctagttttaaaatataatactttaaaataattgatagaagccatgctatagagtgtggctttttttactatgtgtaatctgatgaaagttatttaaacattgtatgtattttacttgatgagtatattggggtaaatcttagaaaatcgtttgaaaatgtatgtgataggtgttttgaatgacgagataacgccaagcatatgtattaacaatcattagaattttcgcggatttagaggtattgtgttaatcatacgtgctttattaaacagtcgtaaagatgataaataagttgggagttgcttaaaataaaaaagcacgccaaaacgttagcattgttttccaacgtttggcgtgcaactatttaattcagtgtgtttattgatcccaatagatcgagtcgatttcaccgtttttaacaactttaatattttttctgttctcttctaaaggacgagttaagtcaaaagtatagtaatctctaggaccaccatctttaattctgacaactgctttcttcacatcaccttggcttaattttttaacaataaggtacagatcattaacagtttcacctttgtaaggtttttgatttttatcagcttctttcattaacttatcaatacgttcttcttcctgtttagcttgatctgctaattttttagcaatttctaaacctttccattcataactaaagaaagctttagcatcatttgaatgagttagaagacctgtagcgatgactgtagatgcaataattacttttgtaatattttttttcataataagttctccctgtaaaatagatttgtacttactaatgcgagtacactgctattttacaaacggtttcaagcatttaccagttaacacttcattaattaaatttaagtgcaaattaataaggtttaatgcaattgaaaaagaatattgatgaatttgatattattatttttatttgaggtattattggatttattgatagtataataatattagtaaacatcactcaactatgattgaatgatttttattgttaaaacgatatttatatttctctactattttatttgcaatgatgggtagacaaacactccaaagtgttatacatgtagctgttttgataattaatgtttataaaacaaagaaatgattcatagtagagaagtaattaatatgtataattttacttataaagaaataagagatatattctaattaaggttgatatgttatgattaatatataagttaaaaaatatactatttagttgtattatgcattttcgaagtaagcataattcaacacttacacttttaaatagataaaatagtgtaaaatcacgtgccaagattactatagagtaggcattgagtattattggcaatcacttaagtgattgttattttttcgtggtcaataataaagatataaataaatatattgaggtcaaacgatgataattaaaattttaacaattctattactactttgtatattgagctatttggttacaaataaaaagaagccttttctgttcttaaagacactctttatgggtgtggtgtttatctttataggatatatttcactggcaatatctgccgtaattatttatggtattattcaatttatcacaattgattttggtagttttttcttaatgggtattatattgatcttgatttcaagtatattccaattatttatagttagattactttttagaaaaaagaatgtcgatttaacagaggttgtcgttttagaacatttaattcaatggttcttagtttattttgcgatctatcaagcagtaaatgaaaaaatggacattaatgatattaatatcgacaatttccaatcagtcttttttgacgtgtctaatttgaatttagtaattctaccaactttgattattagctgggttacaatatttaactatagaatgagaagttacaaataaatttaatgacatgatactataagacaccaacattcaaatggtgtcttttttgttgtgtagttttatttttaaaattcgaaaaagtagaggtatgattttttgactaatatataagtgctgatgcgtcacaaggtagataactatattttatatatattataaagtgtttatagttaattaataattagttaatttcaaaagttgtataaataggacaacttaataaatgtaagataacaatttggaggataattaacatgaaaaataaattgatagcaaaatcattattaacaatagcgtcaattgggataactacaacaacacttgcatcaacagcagatgcgagtgaaggatacggtccaagagagaagaagccaattagtataaataataatattgtagaatataatgatggtacatataagtatcaatctagaccaaaatttaatacaacacctaaatatattaagtttagacatgattataacatcgtggaatataatgacggtacattcgaatatggtgcacgtccacaatttaataaaccagcagcgaaaactgaggcaactattaaaaaagaacaaaaattgattcaagcccaaaatcttgtgagagaatttgaaaaaacacatactgtgagcgcacatagaaaagcacaaaaggcagtcaacttagtatcatttgaatacaatgttaagaaaatgatattgcaagagcgaattgatcaagtattaaagcaaggattagtgagataatacttctgtcattattataagttcaaaataatttaatattatattattttttattaataaaacgactatgttatttaatgacaggttaatgtaactttcctaaaattgactatataatcattaagtatcaatttttaaaggagaatttacaatgaaatttaaaaaatatatagtagcaggaacattagcagtactattatcaacaacagcagtatcaacgttagatgggaacaaagcagatgcaagtagtaagaaagattatataattcaaagtgagtttcatgataaacgaattgctgaagaattgaaatcattacttgatcaatcttatgtaaatgatttagctgcaggaagcttaaacccatactacaaacgtatgattatgatgaaccaatatagagcaaaagcagcactaaaaagtaataatttcgcaaaaatggctgaagctaaagttggattagaaaacatttacaaagaaattgatgaaattataaatagataataaaaaacaggctgagacaataataccattgtcttcgcctgttttttatttgtacagttaaaaattctgcaatttaatatttatgtatgagcaatgtatacaaaaaataggggagacaaatataaatataatagttagaaatattatgcacaaaattgctttgtacaatctaaaaaatatttatagtgctcccatagataaatttaaacgtagtatgaaacgttctgatttttactcaatgagtatattattggaagaaaaagttaacgtgtgtcgaacatgccacgatgccaaatataatgaatagaaataagacaataagcatggcggcgctttttaaacaacctctatttgtttcctccgaatttctttgttgaacctttttataatcttcaagatgctttgtggtctttttatttatatgtttattcatgatgtttactccttaatctaaatgtaaattgcattaaaatagttgaaaacataacttgaaataaagatataaagcttaagttaggctgctcgttgtttcaaattttaagtgagtatcatgttaaattagatgataacttgtttcgtttattttccaatttgtttgtttttaaactgacgtattaaaatattaatgaaacattagaatacataaatgaacagtaaaggtgcacagtatagaaggattaatgccacactaagtataaatattgttagctgtaaactatctttagttttaatataaacaattaatataagtagtgttaaaaggatcatatatattaatgacgaagaagtccaaacaaaatctgcgtcattggtagttagcaatgggacgataatcagtccgaagttaatcatgcatgctatatatacaatgatgttatacacaatgttaatttttggtcaccaccttaactgttgtttttaaatgctttgaaaaattgcattttaatagtgtaatgaatatccgaatttctaattttcgttcgttatacttttaaaagactatatatagtatgcttttatgtttctaaatgttttttaatatttaattctcgtcaatatttggattatgaatcatcaactcaagtactttgttagatgcgtcaattgtaaattcagagccatagttaacatgactaacttttaatttattatctaaataattgattgcgattgcgacatcataatcttcatcaataacaaataaactattttcgtttgtaactacttcatgtttccctgagtaaacaacattaatttcccaatctttaaaaaccatttgtcatcctccttgaacatttaaactgattcaatctaagtttaacttattcatacaacttcttacaatatctagattagagataaatagatttctagaaattattttcaattatatgtacttattatactttttatcttcttatttcagtatagttttaaaacgattttaaaataattctgcaaatatattaacacataatgtgttcaataagttttgaacaatttcaaaacttttaattaaagggtttgacaacatgaatttcaaatgtttgaagttaagaaatcagtaccgtaatcatgattttagccgtgaatatatactgaaaagcataataggtatattactattcatgatgtttaattttatactgcaactaaaatagccgacgcacatcatttctgatgttatcggctaatattattatgtgactatttgagtgtacataaccattaatttgtcatttcttctttttcccaatcgattttatatctttctgaagaacgatctgtccatttatctttagtattggtacctttccaatttgttgaagtccaatgcaattggtagtcatcacgaactcgttcgtatattacatctatatttgtttgttgtttggatgcttttctatccatagtaataactgtagcgaagtctggtgaaaaccctgaagataatagagaacttgctttgttaggatcaaggaagttatctgctgctttcattgaaccgtttcttgttttcatgaaaagttgattgccgtatactgggttccaagaatctctgtcatatggtccccaattttgattcaccatattgttaaatataactttccaacctacttttttatcagttggactttctaaaattgttttgaaatctggttgaacatatttgagcgtatgaccaattgaaacatttgcaccaatcaaaccgccaatttttccagaatcatcaccagtcacgttaccgttgaatccataagttaatgtactcatatattctttagtatcaattgaatttctagggtagtaatcagaaatttgtgctacttcattatcagatagttgcaactgtaccttaaatgctgaaggccaggctaaaccgcttttattagcgccttcttcgctataaactctatactgaccagcaatggtacctttcgttctgatgactaatatttttttattgtgatttttatcatcgataaaactataaaatacttttttgtgcatgccattttctttatcataagtgactaaatcacctgtttttactgtagtattgcttcctatatctgtagtaccggttttaatattaatatcagaatctgcggcattagcgacaggattcattaatatagaacctagcaatagtgttgttgttactgagctgactatacgtgttttcattttcatcatccttctattttttaaaacgatttgaggaaacaataatcaatatgtcaatttagaataatgcagttgagacatatcaaatatttatcatcgtttatattagtatatttaatgtagcaactgttaaatgattgagtgatgatgagtgaatattttaagaatatgtttttaacttttaattaatatttgaaaggaagcatttcaatttcgaggcttagtcaaagttgaatgaactctttatgaaccaaggaaaagacaaagctaattttattgattaatttctttaaaactgggtgtttatttaactttaaaatgtaatcgattacaatataaaaatacaaatatcttagaattaaatcaattaattaactgttaaataaaagttaactgtatattaactaatataattaatcaattatgaatagagaaaaaattaattgtcttggaatatttgtgcgaattaattttaacaaaatattgtgctttcgtataaaaatgtaaaagggtgtagtgtaatattataaaacattgtaaaatatgttatacaagggaaaatgtagacatctagttataggcgttataagagaatcttaaacttaggttagcttttaatgttgaaactaagtggaaagtgataaatataaaaatgataggggattataatgaaactattttaaatcgcatttctaattattttatggctgaatatatttttaggaaatgaagtcattcatacactgactgttttaataacaacattgtatattgttaatagaagaaagagggttaaaaatgacagagttgaatgaaattatcaacgctattcaatctttgtttgagtctcaatcaggctacaaaatatcgaaaaattcaggggtgccgtatcagaccgtacaagatttgaggaatggtaaaacgaaaatagaagatgctagatttagaacaattataaaactatatagttattatacatcattaaaagagcggtcataattaaataaagagtagagcctaagacataaccacgacttaggctctacaatattatatagacagacattgaccaaacaaaaatgcgattataacaagactttaaattagagacaggggccccaacaaaaagaatttcgaatagaaattctacagacaatgtaagttggggtggggccccaacacagagaatttcgaatagaaattctacaagcaatgcaagttggggtgggccccaacacagagaatgacttggcatttctattagactccaaatcgcatttaatattctgtgtactaaattaatgattgtgtaagtactattgagacattttgtagtattaatcaactattgtttatccttagtgtttgcgatataaatcatacgaccttatttaatcgataaggacctcgactgttattttttgaggatttttaacataaacatttgcaagatcagaatgtaatcttttactcaaatcaattgtaaagtcattgccgccaccgatgattttaagtttacctttattgcgattttcatgatataatattttatttttaattagtgtttcacgtgctcgaaaatcaatttctttcaatgttaatattggtttattaccttggtacatcttatgtgcaccaataattgtttgtagtttatctttgtattggacaaaaagactatatggtttatcagaaggtgatgcagcaggtgttacaccacctgtaaatgtatcacgatatacccaccataactggctagtgtcttcgtcttttaaaccaaacacgtctacatagcggtctcttaattgattaacgttgccccaactttcagcaccccataatcgtatatgcgctgaccaagaataacgcttaaattcaacataaatgttgccgtcatcatattggtataaccatctatttgaaaatgtgagaggcggttgtgtgtaatatttaattaactcattgatgttcgtttcgtcttggccaatatgataagctttagcgtcagtagaaacatttaatggcgaattaggggtttgtgtagctgttgttcctaataataacaatgttgtcataaaaattaattttttcataatacgctttctcattcgaacttctcctttctgcataatcatcaatacgagaattaacaaatttaaaaatgaacggcgtcaatgtaaacattgtgcttatttctgtttacttcgatttcgatgttagctaggtttttcaaggaggatttcgatgtgtgcagtttgagggtttttaacatatctatttgcatcagttgattttaatcttttgcttaaatctattgtatagttgttgctgccacctgtaatcttaatgtggcctttattataatcaccattatataattttttgtttttaattagtgtttggcggattcggaaatcaacttcctttaaagttaaaactggtttattacctgtataaaattgatattcgccaataaatgttcctgctttatctttatatgttacattcaatttataatatttatcgctaggttttgctgctggtgtaacaccaccagtaaatgtttcttgggctaacatataagtgcgccaggtttcataatcttttaaagcaaaaatatctacatatttatttcttaattgattaatattaccccaactttcagggccgaatacttgaatatgactaaaccatgataactgtaacaatgttgcatggattgtaccattatctttttgccatagccatttatttgaaaatgttaaatggcgttgtgtgtaatatttagtcaattcatttacattcgtttcgctttcacttatattgtatgcttttgcttcagatgacatactaatcggtgaatgaggggattgacttgtagctgtgcctatcatagtcaatgctattgataaaataattttttttgtgaggttgtttttcattagaaaatctcctttacgaggaatgttatatgcgaggaataataagtttataaaaagagagaaatcaattaaatcattcagtctatttgtattcactcaatgaatgatactaatgagatttttcaagaatgacttcaatttctgcatgtcgaggatttttaacataacggtttgtgtcagttagttttaactttttactcaaatcaatcgtataatgattaccaccacctgtaattctaatttgacctttattaaattctccattatatagctttttgttcttaattaaagtttgacgtacgcggaaatctagttcttttaaagttattactggtttattaccttgataaaactcaagtccaccaatcatagtttgttgtttatccttatattttaaaaataatttataaggcttatcagatgaagtagctgctggtgttacacctccagtaaaggtttcatcataagtccaatagccttctatagtatcctcatccttggtaccaaaaatatctacatatttatctcttaattgattaatgttgccccaactttcaggtccaaatacttgaatatgcgtgtaccaaacccacgtttgtaatgttgcatgtatggtaccgttagggttttgccatagccattttccagaaaatgaaaggtgtggctgcgtgtaatatttgattaattcattgatattcgtttcgttttcacttatattgtatgcttttgcttcagatgaaaaactgattggtgctttaggcggttgtgttgatgtagttcctaaaagtaacaatgctgtagataaaacaattttgttcgtgatgttctttttcatatgataatctcctttgcgtgaattacccatagtatataaggtattgcgccgattcggaattaaataaaagctaacactatgttaaataaacataaacagttgaacgtgtgatttaagtaaaatttttcatttttaagcattggaacattgccaattataaaatgaaaagagtgctaataaattaaaactgatggtaattatgatattaattgcgttaaattagttatttattgaattttctaactacttgaaaaatagttatactttaaatgtagtacttattttaataatttcctactacttaaatttaatattaataaaatgttcatttaattattgataaaatattacaaattttaatagtaggttgtgtttattttgtatgcgcttacaatttaggtgtaactaaaataaaaggagttgttattaatgaaaaatttacgaaacagaagttttttaactttattagacttttcacgacaagaggtagaattcttattaacactctccgaggatttaaaacgtgctaaatatattggcactgaaaagcctatgttaaaaaataaaaatattgcactgttatttgaaaaagattctacaagaacgcgatgtgcatttgaagttgcagcgcatgatcaaggtgctaatgtaacttatttaggcccaactggatcacaaatgggtaaaaaagaaacaactaaagatactgcacgtgtgcttggtggaatgtatgatggcattgaataccgtggtttttcacaaagaacagtagaaactttagctgaatattcaggtgtcccagtatggaatggtttaactgatgaagatcatcctactcaagttcttgctgattttttaacagcaaaagaagtcttaaaaaaagattatgcagatattaactttacatatgttggagatggtcgtaataacgttgcaaatgcattaatgcaaggtgcagccattatgggtatgaacttccatttagtttgtccaaaagaattaaatccaacagatgaattattaaatcgctgtaaaaatattgctgctgaaaatggtggcaacatattaatcacagataatattgaccaaggtgtaaaaggttcggatgtaatttacactgacgtttgggtatcaatgggtgaacctgatgaagtatggaaagaacgacttgaattattgaaaccttatcaagtaaataaagaaatgatggataaaactggtaatccaaatgttatttttgagcattgcttaccatctttccacaatgctgatactaaaattggacaacaaatttttgaaaaatatggtattcgagaaatggaagttacagatgaagtattcgaaagtaaagcttcagttgtattccaagaagctgaaaacagaatgcatacaatcaaagcagtcatggttgctacattgggtgaattttaaatgatataaggaagtgaatatgatggcgaaaatagtagtagcattaggcggtaatgctttaggaaaatcacctcaagaacaactcgagcttgttaaaaatactgcgaaatcattagtaggattaataacaaaaggacatgagattgttattagtcatggtaatgggccacaggttggaagcattaatttgggacttaactatgctgcagaacacaatcaaggtccgtcatttccatttgctgaatgtggcgcaatgagtcaagcttacatcggatatcaattacaagaaagcttacaaaacgaattgcattctattggaatggataaacaagtggtaacactagtgacacaagttgaagttgatgaaaatgatccggcatttaacaatccttcaaaaccaattgggttattttacaacaaagaagaagctgaacaaattcaaaaagataaaggatttatatttgttgaagatgctggaagagggtatagacgtgttgttccttcaccacaacccatctctattattgaattagagagtattaaaacacttattaaaaatgatacactcgttattgctgctggtggtggaggtataccagtaattagagagcaacatgatggttttaaaggtattgatgcagttatagacaaagataaaacaagtgcgttgttgggtgctaatattcaatgcgatcaattgattattttaacagcaattgattatgtatatattaattttaacactgaaaaccaacagcctttgaaaacaacaaatgttgatgaattaaaacgatatatagacgaaaatcaatttgcaaaaggaagtatgttaccaaaaattgaagcagccatatcatttattgaaaacaatccaaaaggaagtgtgcttataacatcattaaatgaattagatgctgccttagagggtaaagtaggtactgtgattaaaaagtaattgaattgaaacgcttttcaattactatatgtcaaatgcatgatttttattatttaagtgcacccctgaaaataatgcctctattttgatgcggggtgcactttcttaatttatatttataaaatctttaaggtagaaatgctaggttaaatgtcgaaggagatgaaaccgtggaaaatacaaataatgaaagtgaaaagaaaaaacgctttaaattaaaaatgccaggtgcatttatgattttattcattttaacggttgttgcagttatagcaacatgggttattcctgctggtgcatattctaaactttcttacgaaccttcatcccaagaactaaagatagttaaccctcataaccaagtgaaaaaggttccaggtacacaacaggaattagacaaaatgggggttaaaattaagattgaacaatttaaatcaggtgcaattaataagccggtatcaattccggatacttatgaaagattaaagcaacatccagctggaccagaacaaataacaagtagcatggttgaaggtacgatagaagcggtcgatatcatggtattcattcttgtattagggggacttattggcgtagttcaagccagtggttcttttgaatcgggattgctagctttaactaagaaaacaaaagggcatgaatttatgctaattgtgtttgtatcaatactaatgattatcggcgggacgttgtgtggtattgaagaagaagctgtcgcattctatccgattttagtccctatatttatagcgttaggatacgattctattgtttctgttggtgccatattccttgccagctctgtcggtagtacattttcaactattaacccgttctcggttgtaattgcctctaatgccgctggtacaacttttacggatgggttgtattggagaataggtgcttgtattgtcggtgcgatttttgttattagttatttatattggtactgtaaaaaaattaaaaaagatcctaaagcgtcatattcttatgaagacaaagatgcttttgaacagcaatggtctgtattaaaagatgacgatagtgcccattttactttgcgtaagaagataatccttacattatttgtactaccatttccaattatggtatggggagttatgacgcaaggttggtggttcccagttatggcttcagcatttttaatatttacaattataataatgtttattgctgggacaggtaaatgtggattgggagaaaaaggaactgtagatgcatttgtcaacggtgcatcaagtttagtaggtgtatctttaattattggcttagctcgaggtattaatttagtgttgaatgaaggtatgatttcagatacgatcttacacttttcatcatctttagttcaacatatgagtggaccattatttatcatcgtattactatttatattcttctgtttaggttttatcgtgccatcatcttctggcttagcggtattatcaatgcctatctttgcaccactagctgatacagtaggcataccaagattcgtcatcgttacgacatatcaatttggtcaatatgcaatgttattcttagcgccgactggacttgttatggccacactacaaatgttaaacatgcgatattcgcattggttccgatttgtatggccggtagttgcttttgtattgattttcggtggcggagtactaattacgcaagtactaatttatgcataatttgaaatgctatattataaaaaatactaattgggttttatgcatctcgtaggtttgtagaaatactaaactaagcgaggtgcattattattttgaataagaaaataatggcggtaatgataacactggtaagtaattgatacaatgttctatttaataatgatatttttaaaatatgtttttaatgtaatgttagatctatggtatattatatttatcgtggtaaatatggtatttgttgtaaacagtttttgtaacacatgatacatatggttgtgaaaatagcatatataaaggatggctataaatgactcatttgacaaaggttttagatacactaactggaatatgcgtagtattattatttagtaaatattttgtggcgtatgcaaatatggtatttgattggaatttaagatggtatttgctagaaaacataccacatttgccaattatattatttattctgatgtttattttcggagttccttctgaaatgataaaagataggcaaaggaaaaataacggcgtttaatttatcgatattttggggtgataaaacttgtcaactattacaaagactaaaataaaaatctttattaattattttattggtatattagctttggcgtttgctgcttatatattatttaaataaagaatagagtgaaacgtgtttatgaattagacgttctagtatagttactacagctttagtcagaaggtatcattgttgttcatacattagatcatattaaatcaaagaggtattgatacacaccaaaaaaggaggcaagattacctgcctcttttttagttattaaatatgcgtgtaattcttggtattagtgttactgagacgcattacgaagaaatttatcttgattttccttttttaaaaagaagtgaagatatccaataaagactctaagtactattacagttgctaataacatttcgataaacaaaaggcctttccaaatgactggaaacataagtacaggcaaactgttctttaaagcagttgcagagattactaacgggaatgtgaaagctgaaaatacgggcgaaaaaggttcttttagtaatttaggcaattgtataatgatataaaaataaaatatttgagctaatagtaaaaatacaattacgataaaagcatttgccttaggaaaggctataacatatgctgcagcgactaaagaaaatggtgcacaaattgtcgatgtgttcggtttgattgacgtctgcaatggaaatgcttttaatcgcttgaaaactataggtaagacaatacaagtagctacaaagccatatattactgttaattgacctatgaaaaaatatccgctaacgggtgccgtcaatcctgcgatggcaataccaataaaaagtacagtccacgaaggataaacattcacaagtgaaaaatcttttaaatatttaattgaaaaaataatcatatgtgtcataattcccacaaggcataaaatccaaataggcgttattaaattattgataaatgttatattactaaaaaatgtatttaaataagtagtacctaaaaagccagacatgaaaaatgttgtgaacactgatgaaactagagggctatttaattgttctttcacattattaaaatatttgagcatagtacataaaaggtgaatccaaatcaagaaagcaaagattccgcaaacagcgtttaaagtaagagataaatcttttaatagattacccaggcctaataatcctaagactagtcctgacgttactagaggtgctttttgaagtctcatgatttacaaccttccttatgtgattttcttcactaattatatcatgatagctatgtcctattaataagaagagtgtgtactattacgtttttagagtatgtatattggattgatagacacataattgacatttaaatctcaatattaatgatatttgaggtatgctttgctacctaaatatggaatatgtggaaaagtatttatttaatttaaatgatgattgaagatttacaagggggtgtacaaattgagaaatcaaattcaaaaactattagacagtgatttgagcagtttacatatatcgaaacaaacaggagtgccacaaagcacaatacacagaatgagaaaaaatgaaagatcattagacaatatgtcattgaaaaacgctgaactactttataaatttgccaatggtatatttagtaatgaaaattaagaagaataattagtgagttaataattagaaaaccacgtctcgatgggcgtggttattttttagatgtatataattataattataggatttcgggtccctgaaaagtccctaaaattttgaatagtatcaaaatctataggaataatataataataaaaatctctacgcatgcaaatggtgagtgttaaaaattttggtgtagttttggtgtagttcaggtgcagtatagatgaaatttgagcgtaaaattacttaattaaaaatgtgtaaacatgtatcaaccgcgtgtcaattgtgtgtcaaaaaattctataacgaataagcatgcatgttttaattactgtattttcggggcttatgcgggggacgttttggtgacgcatcatactatattactgaaattcaaaacaaaaagagccccgtaatcacggaactcttttgtttggtaatgcgtataaaaatacctatgaacgtcctgggagggattcgaacccccgaccgatggcttagaaggccattgctctatccagctgagctaccaggacacgtttaacaacacaagaattattatatctaaatgaacttaaattagcaataccttgtaaataaaaaatgtttatatttttcactattatagagctatttatctaaaaaggttcaataagacttaaatacgaattcaggcaacttaattgtgttaaatacagttttgaatgcctaactgtatttcttttctctttaaaatacagttaagtacattataagatgttgtgcggataaacaaactaattgcatcaaatttattttaaaataacaacaacaaaacgttaagcgaataacatttcagtgatttaaaagctacgcacgtttttgttatcttcaaatttaaattttaaggagtgttttcaatggaaggtttatttaacgcaattaaagataccgtaactgcagcaattaataatgacggcgcaaaattaggcacaagcattgtgagcatcgttgaaaatggcgtaggtttactaggtaaattattcggattctaatttcaatatgttatgtaagtaataagtattatttcaaaggtgagggagagatttaaatgactggactagcagaagcaatcgcaaatactgtgcaagctgcacaacaacatgatagtgtgaaattaggcacaagtatcgtagacatcgttgctaacggtgtaggtttactaggtaagttattcggattctaatataataactaatattctttaaaataaactgggtgagcatactttaatgttatgcactcagtttattttatttgcagaaatttgagcctctgttaagatttagatacatagacaatataggagatggggaaattgggatataaaaatattttgatagactttgatgatacaattgttgatttttatgatgcagaagaatgggcattttactatatggcgaatgtttttaatcataaagcaacaaaggatgattttttaacatttaaaaaaatcaatcaccaacattgggaagcttttcaacaaaataaattaacgaagtctgaagtattatcagaacgatttgtgaattacttcaaacatcatcaaatggaagttgatgggcatcgtgcagatgtgttatttagaaatggattagcagaagctaaagttaaatactttgatcaaacattagaaacaattgtcgagttatcgaaaagacataatctatatattgttactaatggtgtaacagaaacgcaaaagagaaggttaaatcagacgccattgcataaatatattaaaaagatatttatatctgaggaaacaggatatcaaaaacctaatccggaattttttaattatgtttttaatgatattggtgaggatgaaagacagcactcgattatagttggagattctttaacatctgacattctaggtggaatcaatgcgggtatagctacttgctggtttaattttagaggatttgatcataatccaggaattatacctgattatgaaattaattcatggaaacaactaaatgatattgtacgttaagacaaataatttgaaaatgatttacttatattagctaagaaagtaattgtaaaaaagacactacgaaaagatgcattttcatgctcgtagtgtcgaatattattatcttatggtttccacaataagacatcatgtccctctatatttttagcttccacatctgtaaatccatgatgtaaaaagaaatctttagaatcatttctgccaatggctttaattggcatattgaaactctttgcaaaatcaatcaattctgaagcgtaccctctgttttgatattttggtaatacttctaacttccataataatatataatcttcaaaatctgggaagtagatttcttcgacatcacctttttttagtaatgccattctagctcctaattgatctccgacaaatatgccataaaatggtgaatctgaacttgcatcaatcatttgaccgttcaactcattgaccatgtataagtctttgttgccaaacgctctaaagttttcgaataattcgtcagttttgtaattaatttcaagacgtttgatttcactcatatttatctaccccttatttgtttactactattattatacattaaaccacttgtgtttttcattgatttgaaaatgtaaaacaatgaatattataaattttccatgattaaattgattttcaagccgtaaaattgtcaatcaccggtatagactttatactatagtttgtaatcgcgtacttaaggagaaaaaacatggactgtaaagtagttagtttaaatgaaaaagatcagtttataccaaaaataaagagcagtgaccctgtaataaaaggattatttcaatatgatgcagctcaacaaactagttttgaaaaaaggatgtctaaagaaaataatggaagagaagcggcattagcgaatgttattcgtgaatatatgagtgatttaaagctttctagtgaacaagaattaaacatacaacatttagctaatggttcaaaagttgtgattggtggacaacaagcagggcttttcgggggaccattgtatacattccataaaatattttcaatcattactttatctaaggaattaacggatacacataagcaacaagtagtacccgttttttggattgcaggagaagatcatgacttcgatgaagtgaatcatacatttatttataacgaaaatcatggatcgctgcataaggttaaatatcatacaatggagatgccagagacgactgtctctagatattatcctgataaggctgaattgaaacaaactttaaaaacgatgttcattcatatgaaagaaactgttcatacacaaggtctacttgagatttgtgacagaattattgaccaatatgactcgtggactgatatgtttaaagcactactgcatgaaacatttaaagcatatggcgttctatttatagatgcgcagtttgagccgttaagaaaaatggaagcgcctatgtttaaaaagattttgaaaaaacatcagttgcttgatgatgcttttagagcaacacaaaaacgtactcaaaatcaaggcttgaaggcgatgatacaaacagatacaaatgttcacttattcttacatgatgaaaatatgcgtcaattagtttcgtatgatggtaagcattttaaattaaataaaacagataagacctatacaaaggaagaaattataaatatagcggaaaatcaacctgaattattttctaataatgtagtgacaagaccattaatggaagaatggctatttaacacggtggcatttattggaggaccgagtgaaattaagtactgggctgaactaaaagatgtatttgaactatttgatgttgaaatgcctatcgtgatgccaaggcttagaattacttatttaaatgaccgtattgaaaaattactttcgaaatacaatattccattagaaaaagtgttagtcgatggtgttgaaggagaaaggagtaagtttattagagaacaagcatcagatcaatttattgaaaaggtagaaggtatgatagaacaacagcgtcgtcttaaccaagacttattaaatgaagtggtggggaatcaaaataatattaaccttgtgaataaaaataatgaaattcatatacaacagtatgattatttgttaaaacgttatcttttaaacattgaaagagaaaacgacatcagtatgaagcaatttagagaaattcaagaaacactccatccaatgggaggattacaagaaagaatatggaatccacttcaaattttgaatgattttgggatagatgtgttcaagccctccacctatccaccactttcttacacttttgatcatattattataaaaccttaatataccaagggtttagcccgatttatcataatgataaatcgggcatttttttgttttttaaaataaatttcacaaattttgtataaatagtggtggatagtggggagatgtggtaaattatatataaggtgaggtgataaaaaatgttcatgggagaatacgatcatcaattagatacaaaaggacgtatgattataccgtccaagtttcgttatgacttaaatgagcgttttattatcacaagaggccttgataaatgtttattcggttacactctagacgaatggcaacagattgaagagaaaatgaaaaccttacctatgacaaaaaaagacgcacgtaagtttatgcgtatgttcttctctggtgctgttgaagtagaacttgataagcaagggcgtattaacatccctcaaaacttgaggaaatacgctaatttaactaaagaatgtacagtaatcggtgtttcaaatcgtattgagatttgggatagagaaacttggaatgatttctatgaagaatctgaagaaagtttcgaagatattgctgaagatttaatagattttgatttttaaaatggaggaattgaagtgtttcatcatatcagcgttatgttaaacgaaaccattgattatttaaatgtaaaagaaaatggtgtgtacattgactgtacgctaggtggagcgggacatgccctttatttactaaatcaattaaatgacgacggaagattaatagcaatcgatcaagaccaaactgcaattgataatgctaaagaggtattaaaggatcatttgcataaggtgacttttgttcatagcaacttccgtgaattaactcaaatattaaaagacttaaacattgaaaaagtagatggaatctattacgacttgggtgtttcaagcccacaactcgacattccagaacgaggattcagttatcaccatgacgcaacattagacatgcgtatggaccaaacacaagaactaacagcatatgaaattgttaacaattggtcatatgaagcgttagtgaagattttttatcgctatggcgaggagaaattttcaaaacagatagctcgaagaatcgaagcacatcgcgaacaacaaccaataacaacaacattagaattagttgacattataaaagaaggtattcctgcaaaagcaagaagaaaaggcggacatcctgcaaaacgagtatttcaagcactacgaattgcagtaaacgatgaattgtcagcttttgaagattcaatagaacaagcgattgaattagtgaaagtagacggcaggatttcggtaatcactttccattctttagaagatcgtttatgtaaacaggtgttccaagaatatgaaaaaggtccagaggtaccaagaggattaccagttataccagaagcatatacacctaagttaaagcgtgttaatcgtaaaccgattaccgctacagaagaagatttagatgacaataacagagcacgaagcgcgaaattacgtgtagctgaaatacttaaataaggagcaattaataatggctgtagaaaaagtgtaccaaccatatgacgaacaagtttataatagtataccgaagcaacaaccacaaactaagcccgaaaagaagactgtttcgagaaaagtggttgtacaattaactaaatttgaaaaagttttatacataactttgattactgtaattgctatgttaagtatttatatgctatctttaaaaatggatgcgtatgatacgcgaggaaagattgcagatttagattataaaatagataaacaatcaagtgaaaacagtgctttacaatctgaaatcaaaaagaattcttcttatgaacgcatatacgaaaaggctaagaaacaggggatgagccttgagaacgataatgtaaaggtagtgcgtagtaatggcgaagcaaaaaattaaaattaaaaaaaataaaataggggcagtcctacttgttggtttattcggactgctcttttttatattggttttaagaatttcatatatcatgattactggacattctaatggtcaagatttagtcatgaaggcaaatgagaagtatttagttaagaatgcacaacaaccagaacgaggaaagatatatgatcgtaatggtaaagtgctagcagaagatgtagaaagatataaacttgttgcagtaatagataaaaaggcgagtgccaattctaaaaaacctaggcatgtagttgataaaaaagagactgcaaagaaattatctacagtcattgatatgaagccagaggaaattgaaaagagacttagtcaaaagaaagccttccaaattgaatttggacgcaaaggaacaaatttaacgtatcaggacaaattgaaaatagagaaaatgaatttgcctggtatttctttattgcctgaaacagaacgattttatccaaatggcaattttgcatcacacttaattggtagagctcagaaaaatccggatactggtgaacttaaaggtgcgcttggagttgaaaagatttttgatagttatttaagtggatctaaaggatctttgagatatattcatgatatttggggatatattgcaccaaatactaaaaaagagaagcagcctaaacgtggtgatgatgtccatttaacaatcgattcaaatattcaagtatttgttgaagaggctttagatggcatggttgaaagataccagccgaaagatttatttgcggttgtcatggatgccaaaactggagaaattttagcatacagtcagcgaccaacatttaatcctgaaactggtaaagattttggtaaaaagtgggcaaatgatctatatcaaaacacatatgagcctggatcaacatttaaatcatatgggttagcagctgctattcaagaaggtgcttttgatcctgataagaaatataaatctggacatagagatattatgggttcacgtatttcagactggaatagagtcggttggggtgaaatcccaatgtcactcggatttacttattcatctaatacattgatgatgcatttacaagatttagttggtgcagacaaaatgaaatcttggtatgaacgatttggatttggaaaatcaactaaaggtatgtttgatggagaagcacctggtcaaattggatggagtaatgagttgcaacaaaaaacgtcatcatttggtcaatcgacaactgtaacacctgttcaaatgttacaagcgcaatcagcgttctttaatgatggtaatatgttaaaaccatggtttgtgaatagcgttgaaaatcctgttagtaaaagacaactttataaaggtcaaaaacaaatcgcaggcaaaccaataacaaaagagactgctgaaaaagttgaaaagcaattggatttagttgtgaatagtaagaagagtcacgctgcaaactatcgtattgatggttatgaggtcgaaggtaagactggtacagcacaagtcgctgcacctaatggtggtggatacgttaaaggtccaaacccatattttgtaagttttatgggtgacgcaccgaagaaaaatcctaaagttattgtatacgctggtatgagcttggcacaaaaaaatgaccaagaagcttatgaattaggtgttagtaaagcgtttaaaccaataatggaaaatactttgaaatatttaaatgtaggtaaatcaaaagatgacacatctaatgcagagtatagtaaagtgccagatgttgaaggtcaagacaaacaaaaagctattgataatgtgagtgcaaaatcattagaaccagttactatcggttctggtacacaaataaaagcacaatctataaaagcggggaataaagtcttacctcatagtaaagtactgttattaacagatggagacttaactatgcctaacatgacaggatggacgaaagaagatgtcattgcttttgaaaacctaacaaatattaaagtgaatttaaaaggtagcggttttgtgtcccaccaatcaattagtaagggacaaaaacttactgaaaaagataaaatagacgtagaattttcatcagagaatgtagacagcaattcgacgaataattctgattcaaattcagatgataagaagaaatctgacagtaaaactgacaaggataagtcggactaacaagaatggctacattaaataaggatgtattgtcactatttgtttttactaaagtaatgctgtgatagaaaacaacatcttcatttaatctttataaataagtgttgatagagaattttaaggtagacgaggtcagattaacttgtttgttataggcaaactttttatactggcctcttatgccgtaaaaaagaaaaattataaattttgattacaactttgtttatttaattgaaaaattgataatatattagtggttaaaaaagtctggattaagaagaggagatagttatgatttttgtatatgcgttattagcgctagtgattacatttgttttggtacctgttttaatacctacattaaaaaggatgaaatttggtcaaagtattcgagaagaaggtccacaaagccatatgaagaagactggtacaccaacaatgggtggactaacatttctattaagtattgtgataacgtctttggtggctattatatttgtagatcaagctaatccaatcatactgttattatttgttacgattggttttgggttaattggttttatagatgattatattattgttgttaaaaagaataaccaaggtttaacaagtaaacagaagtttttggcgcaaattggtattgcgattattttctttgttttaagtaatgtatttcatttggtgaatttttctacgagcatacatattccatttacgaatgtagcaatcccactatcatttgcatatgttattttcattgttttttggcaagtaggtttttctaatgcggtaaatttaacagatggtttagatggattagcaactgggctgtcaattatcggatttacaatgtatgccatcatgagctttgtgttaggagaaacggcaattggcattttctgtatcattatgttgtttgcacttttaggatttttaccatataacattaaccctgctaaagtgtttatgggagatacaggtagcttagctttaggtggtatatttgctacgatttcaatcatgcttaatcaggaattatcattaatttttataggtttagtattcgtaattgaaacattatctgttatgttacaagtcgctagctttaaattgactggaaagcgtatatttaaaatgagtccgattcatcatcattttgaattgataggttggagcgaatggaaagtagttacagtattttgggctgttggtctgatttcaggtttaatcggtttatggattggagtgcattaagatgcttaattacacagggttagaaaataaaaatgtattagtcgtcggtttggcaaaaagtggttatgaagcagctaaattattaagtaaattaggtgctaatgtgactgtcaatgatgggaaagacttatcgcaagatgctcatgcaaaagatttagaatctatgggcatttctgttgtaagtggaagtcatccattaacattgcttgataataatccaataattgttaaaaatcctggaataccttatacagtatctattattgatgaagcagtgaaacgaggtttgaaaattttaacagaagttgagttaagttatctaatctctgaagcaccaattatagctgtaacaggtacaaatggtaaaacgacagttacttctctaattggagatatgtttaaaaaaagtcgcttaactggaagattatccggcaatattggttatgttgcatctaaagtagcacaagaagtaaagccaacagattatttagttacagagttgtcgtcattccagttacttggaatcgaaaagtataaaccacacattgctataattactaacatttattcagcgcatctagattaccatgaaaatttagaaaactatcaaaatgctaaaaagcaaatatataaaaatcaaacggaagaagattatttgatttgtaattatcatcaaagacaagtgatagagtcggaagaattaaaagctaagacattgtatttctcaacacaacaagaagttgatggtatttatattaaagatggttttatcgtttataaaggtgttcgtattattaacactgaagatttagtattgcctggtgaacataatttagaaaatatattagcagctgtgcttgcttgtattttagctggtgtacctattaaagcaattattgatagtttaactacattttcaggaatagagcatagattgcaatatgttggtactaatagaactaataaatattataatgattccaaagcaacaaacacgttagcaacacagtttgccttaaattcatttaatcaaccaatcatttggttatgtggtggtttggatcgagggaatgaatttgacgaactcattccttatatggaaaatgttcgcgcgatggttgtattcggacaaacgaaagctaagtttgctaaactaggtaatagtcaagggaaatcggtcattgaagcgaacaatgtcgaagacgctgttgataaagtacaagatattatagaaccaaatgatgttgtattattgtcacctgcttgtgcaagttgggatcaatatagtacttttgaagagcgtggagagaaatttattgaaagattccgtgcccatttaccatcttattaaagggtgtgagtattgatggatgataaaacgaagaacgatcaacaagaatcaaatgaagataaagatgaattagaattatttacgaggaatacatctaagaaaagacggcaaagaaaaagatcaaaggctacacatttttctaatcaaaataaagatgatacatctcaacaagctgagtttgatgaagaaatttacttgataaataaagacttcaaaaaagaagaaagcaaagatgaaaataatgattctgcttctagtcatgcgaatgataataatatcgatgattctacagactctaatattgaaaatgaggattatagatataatcaagaaattgacggccaaaatgaatcgaatggaattgcagtcgacaacgaacaacctcaatcagctcctaaagaacaaaatagtgactcgaatgatgaggaaacagtaacgaaaaaagaacgaaaaagtaaagtaacacaattaaagccattaacacttgaagaaaagcggaagttaagacgtaagcgacaaaaacgaatccaatacagtgttattacaatattggtattgttgattgctgttatattaatttacatgttttcaccacttagtaaaattgcgcatgtaaatataaatggaaataatcacgttagtacttcaaagataaacaaagttttaggtgttaaaaatgattcgaggatgtatacgtttagtaaaaaaaatgctattaatgatctcgaagaggatccattaatcaaaagtgttgagatacacaagcaattaccaaacacattaaacgtagatatcacagaaaatgaaattattgctttagtgaaatataaaggtaaatatttacctttattagaaaatggtaaattgcttaaaggttcaaatgatgtcaaaattaatgatgcacctgtcatggatggtttcaaaggtacaaaagaagatgatatgattaaggcgttatctgaaatgacacctgaagttagacgatatattgccgaagtgacatacgccccaagtaaaaacaaacaaagcagaattgaattgtttacgacggatggacttcaagtaatcggtgatatttcgacgatatctaagaaaatgaaatattatccgcagatgtcacaatcattatcaagggatagttcgggtaaactaaaaacacgaggctatattgatttatcagtcggtgcttcatttatcccataccgtggaaacacgtctagtcaatcagaaagcgataaaaatgtgactaaatcatctcaagaggaaaatcaagcaaaagaagaattacaaagcgttttaaacaaaattaacaaacaatcaagtaagaataattaaaaaattttgatattgtctatgtttatagttcacaagccattcaacgtattgtaaactaaagatagtgtattttttaatagtaatttgtcaggaggtgcctatctatggaagaacattactacgtaagtattgatattggatcatcaagcgtaaaaacaatagtaggcgagaaatttcacaatggtataaatgtgataggtacaggacaaacctacacgagcggtataaaaaatggtttaattgatgattttgatattgcgcgtcaagcaatcaaagacacaattaaaaaggcatcaatcgcttcgggtgttgatattaaagaagttttcctgaaattacctatcattggaacggaagtttatgatgaatcaaatgaaatcgacttttatgaggatacagaaatcaacggttcacatatcgaaaaagtattagaaggtattagagaaaaaaatgatgtgcaagaaacagaagtaattaatgtgttcccgattcgttttatagtcgataaagaaaatgaggtttcagaccctaaagaattaattgccagacattcattaaaggttgaagcaggcgtaattgctattcaaaaatcgattttaattaatatgattaaatgcgttgaagcatgtggtgttgatgtattagatgtttactctgatgcatataactatggttcaatcctaacagctactgaaaaagagttaggtgcatgtgtcattgatattggtgaagacgttacgcaagttgctttttatgaacgcggtgaattagtagatgctgattctatcgaaatggcagggcgtgatattacagacgatattgcacaaggattaaacacttcttatgaaactgctgaaaaagttaagcaccaatatggtcatgcattctatgattctgcttcagatcaagatatcttcactgttgaacaggttgatagtgatgaaacagtacagtatactcaaaaagatttgagtgactttattgaagcgcgtgtagaagaaatattcttcgaagtatttgatgttttacaagatttaggattaacaaaagtaaatggtgggtttattgtaactggtggatctgcaaacttacttggcgtaaaagaattattatcagatatggtaagtgaaaaagttagaattcacacgccatcacaaatgggaattagaaaacctgaattttcttcagcaatttctacaatttctagtagtatcgcttttgatgagttattagattatgttacaattaattatcatgataatgaagaaactgaagaagatgttattgatgtgaaagacaaagataacgaatctaaattaggcggatttgattggtttaaacgtaaaacaaacaaaaaagatactcatgaaaatgaagtagagtcaacagatgaagaaatttatcaatcagaagataatcatcaggaacataaacagaatcatgaacatgttcaagacaaagataaagaagaaagtaaattcaaaaaactaatgaaatctctatttgaatgattattggccaataaaactaggaggaaatttaaatgttagaatttgaacaaggatttaatcatttagcgactttaaaggtcattggtgtaggtggtggcggtaacaacgccgtaaaccgaatgattgaccatggaatgaataatgttgaatttatcgctatcaacacagacggtcaagctttaaacttatctaaagctgaatctaaaatccaaatcggtgaaaaattaacacgtggtttaggagcaggagctaatcctgaaatcggtaaaaaagctgcagaggaatctcgtgaacaaattgaagatgcaatccaaggtgcagacatggtatttgttacttctggtatgggtggcggaactggtactggtgcagcaccagtcgttgctaaaattgcaaaagaaatgggcgcattaactgttggtgttgtaactcgtccatttagttttgaaggacgtaaacgtcaaactcaagctgctgctggagtagaagctatgaaagctgcagtagatacattaatcgttataccaaatgaccgtttattagatatcgttgacaaatctacgccaatgatggaagcatttaaagaagctgacaacgtgttacgccaaggtgtacaaggtatctcagacttaatcgctgtttctggtgaagtaaacttagactttgcagacgttaagacaattatgtctaaccaaggttctgcattaatgggtattggtgtttcttctggtgaaaatagagcggtagaagctgctaaaaaagcaatctcttctccattacttgaaacatctatcgttggtgcacaaggtgtgcttatgaatattactggtggcgagtcattgtcattatttgaagcacaagaggctgctgatattgtccaagatgctgcagatgaagacgttaatatgattttcggtacagttattaatcctgaattacaagatgagattgttgtaacagttattgcaactggttttgatgacaaaccaacatcacatggtcgtaaatctggtagcactggattcggaacaagcgtaaatacttctagcaatgcaacttctaaagatgaatcattcacttcaaattcatcaaatgcacaagcaactgatagtgtaagtgaaagaacacatacaactaaagaagatgatattcctagcttcattagaaatagagaagaaagacgttcaagaagaacaagacgttaatcggttaatatatatacacaaataattcaacacaaatcatcagataacatatctgatgatttttttactaatttttagaacatgtagaaggacatttaagtttttcgaagtcattaaaagtgtttaagtatcgtgtcaaaattaagtcgaaaattatttgcgcaacattttaactttaaacataaatgttatattatataattattaactttgtacagttagacgaagataatttaaatgaaatgatggtgacgatcgagtgaatgataattttaaaaagcaaccgcatcatttaatatatgaagaattattacaacaaggtattactctaggtattacaactagaggcgatggtttaagtgattatcctaaaaatgcttttaatatggcgagatatattgatgatcgcccatataatattactcaacatcaattgcaattagctgaagaaattgcgtttgatagaaaaaattgggtgtttcccattcaaacacatgaaaataaagtcgcttgtattacaaaggatgatataggcacaaatatagacaatttaactgatgagcttcatggtattgatgcgatgtacacatttgatagtaatgtcttattaacgatgtgttatgcagactgtgtaccagtatatttttatagtacaaaacatcattttattgcattggcgcatgcagggtggcgaggtacctacactgaaattgtaaaagaagtgctaaaacatgtgaactttgatttgaaagacttacatgtcgttattggaccatctacatcatcaagttatgaaattaatgatgatattaaaagtaaatttgaaacattgccaattgatagtggaaactatattgaaactagaggacgagatcgtcatggtattgatttgaaaaaagccaatgctgcattattaaattattatggtgttcctaaagaaaatatttatacgacagcgtatgctacatctgaacatttagaattatttttctcttatcgattagaaaaaggtcaaacaggacgcatgttagcattcattggtcaacagtaaataaggaggagatatgcttgcgtgtgaaagataatttacaacaaatctcaacacaaattaatgacaaaagtaaaaaaaataatttttcaacaaaaccaaacgtgattgcagttacaaaatatgttacaatagagcgagctaaagaagcgtatgaggctggaataagacattttggtgagaatagattggaaggcttttttcaaaagaaagaagcattaccatcagatgcggtgatccattttatagggtcattacaatctcgaaaagttaaggacgttataaacgacgtagattatttccatgctttagatcgattgagcttagccaaagaaattaacaaacgtgcagaacataaaattaaatgtttcttgcaagtgaacgtttcgggagaagcttctaaacatggtattgctttagaagatgttgatcagtttatagatgatcttaaaaaatatgacaaaatcgaaattgtaggtttaatgacgatggcaccattgacagatgatgaagcatatattagatcgttatttaaacagttacgtttgaaaaaagaagaaatacaacgactcaatttagaatatgcgccttgtgatgaattatcaatgggaatgagtaatgactatcttattgcagttgaagaaggtgcaacgtttgttagaattgggactaaacttgtaggagaagaggagtgagccacttggctttaaaagatttatttagtggattttttgtaatagatgatgaagaggaagtagaagtacctgacaaacaacaacaggtaaatgaagcgccagcaaaagagcagtcacaacaaacaacaaaacaaaacgcaatcaaatcagtccctcaaaaatctgcatcaagatatacaacaacgtcagaagaaaggaataaccgtatgtctaattattcaaaaaataattcacgtaatgttgtaactatgaacaatgctacaccaaacaatgcatcacaagaaagttcaaaaatgtgtttattcgaaccacgtgttttttcagatacacaagatattgctgatgagcttaaaaaccgccgtgcgacacttgtcaatttacaacgtattgataaagtatcagcgaaaagaattattgattttttaagcggtactgtttatgcaatcggtggagatatccaacgtgtaggtactgatattttcttatgtacgcctgataatgtggaagtagctggaagcattacagaccatattgaaaatatggaacattcattcgactaaggagttaacatatggatataaatgtgctagctacaatatttaaatttatcctttttgttgttgaaatttattatttcggcatgattatatatttctttacatcttgggtaccaagtattagagaaactaaggtgggttattttttagcgaaaatatatgaacctttcttacaaccatttagaaaagtaattccacctattggaattatcgacatatcatcaatcgctgcaattttcgttttagtattattccaaaaagggttactccaaatctttaattggattttaattcaattacaataaattaagcgacataacgaggcaagggtacatgatactttagcctcgtttttgatatgtgtttttctgaatataagggcaatagatggtattttataatttttttaaggtagtgattaacatagatatttatcaacactttagacgggaagaatacgaattaattgatcagctaacggataaatgtgatcaagcggaacagcattatgcaccagtattaacgcattttttagatccaagagggcaatatatattggaagtgatttgtggcagttatgaagatttaaacgtatctttttatggcgggccaaatgctgaaagaaaaagagcaatcatttcgccgaactattatgaacctaaagaaagtgactttgatttaactttaatggaaatagattatcctgaaaaattcgtcactttaaaacatcaacatattttagggacattaatgtctttaggtatcgaacgcgaacaagttggagatataattgtgaatgaacgaattcaatttgttttgacaagtagattggaatcatttattatgttagaattacaacgtattaaaggcgcatcagttaaactttatactattccagtaacagatatgatacaatctaatgagaattggaaaattgaaagtgcaacagttagttctttaaggttagatgttgttattaaagaaatgatacgtaaatcacgtacgattgcgaaacaactaatcgaaaaaaaacgtgttaaagtgaatcacactattgttgattcagcagattttcaattacaagcaaatgatttaatatccatccaaggttttggtagagcacacattactgacttaggtggtaaaactaaaaaagataaaacgcacattacctatagaacattattcaaatagtaatgatttaaggaggataacaaatgccttttacaccaaatgaaattaagaataaagagttttcacgtgtaaagaatggtttagaacctactgaagttgctaattttttggagcaactaagcactgaaattgaacgtcttaaagaagataaaaaacaacttgaaaaagtaatcgaagagagagatactaatattaagtcttatcaagacgtgcatcaatctgtaagtgatgctttgatacaagctcaaaaagctggtgaagaaactaagcaagctgcagagaaacaagctgaagcgattatagctaaggcagaagcgcaagctaatcaaatggttggtgacgcggtagaaaaagcacgccgtttagcattccagactgaagatatgaaacgtcaatcaaaagtatttagatcgcgtttccgtatgttagttgaagcgcaattagacttattaaaaaacgaagattgggattacttgttgaattatgatttagacgctgaacaagtgacgcttgaaaatattcatcatttgcatgaaaatgatttaaagccagatgaagttgcagcaaatgcacaaaataatgcatcgaatacatcagacaataatcaacaatccaatgattcagaaacaactaagaagtaagaattaaataaagacagacgcgtaatatacatttaacttttcacagcgaattaggtaatggtgagagcctagtaaaagcatgtatgttatatcactggctttttaatatttaaataatgtaatgagagaactctaagttgagttaataagggtggtaccgcgagcaatcgtcccttttaatttaacttagagttttttaaatttttaaggagtgaagaagatggattacaaagaaacgttattaatgcctaaaacagatttcccaatgcgaggtggtttaccaaacaaggaaccgcaaattcaagaaaaatgggatgcagaagatcaataccataaagcgttagaaaaaaataaaggtaacgaaacattcattttacatgatggcccaccatacgcgaatggtaacttacatatgggacatgccttgaacaaaattttaaaagactttattgtacgttataaaactatgcaagggttctatgcaccgtacgtaccaggttgggatacacatggtttaccaattgaacaagcattaacgaaaaaaggtgttgaccgtaagaaaatgtcaacagctgaattccgtgagaaatgtaaagaatttgctttagaacaaattgaattacagaaaaaagattttagacgtttaggtgttcgtggtgactttaatgatccatatattacattaaaacctgaatacgaagctgcacaaattcgtatttttggagaaatggcagataaaggtttaatttacaaaggtaaaaagccagtttattggtctccttcaagtgagtcttcattagcagaagcagaaattgaatatcacgataaacgttcagcatcaatttacgttgcatttgacgttaaagatgacaaaggtgtcgttgatgcagatgctaaatttattatctggacaacaacgccatggacaattccatcaaatgttgcgattaccgttcatcctgaattaaaatatggtcaatacaatgtaaatggcgaaaaatatattattgcagaagccttatctgacgccgtagcagaagcactggattgggataaagcatcaatcaaattagaaaaagaatacacaggtaaggaattggagtatgttgtagcacaacatccattcttagatagagaatcgttagtgattaatggttatcatgttactacagatgctggtacaggttgtgtacatacagcaccaggtcacggggaagatgactatattgttggtcaaaaatatgaattaccagtaattagtccaatcgatgataaaggtgtatttactgaagaaggcggccaatttgaaggaatgttctatgataaagctaataaagccgttactgatttattaacagaaaaaggtgcactattaaaattagactttattacacatagctatccacacgactggagaacaaaaaaacctgtaatcttccgtgctacaccacaatggtttgcctcaatcagtaaagtaagacatgatattttagatgcaatcgaaaatacaaacttcaaagtaaattggggtaaaacacgtatttacaatatggttcgtgaccgtggcgaatgggttatttctcgtcaacgtgtttggggtgtaccgttaccagtattttatgctgaaaatggcgaaattatcatgacgaaagaaacagtgaatcatgttgctgatttatttgcagaacacggttcaaatatttggtttgaaagagaagcgaaagacttactaccagaaggatttacacatccaggcagccctaacggtacatttactaaagaaacagacattatggacgtttggtttgattctggttcatcacaccgtggcgtgttggaaacaagaccggaattaagtttcccagcggatatgtatttagaaggtagtgaccaatatcgtggttggttcaactcttctattacaacttcagttgctacaagaggagtatcaccttataaattcttactttctcatggttttgttatggacggtgaaggtaagaaaatgagtaaatctttaggtaatgtgattgtacctgaccaagtggttaaacaaaaaggtgctgatattgcaagactttgggtaagtagtacggactatttagctgatgttagaatttctgatgaaattttaaaacaaacatctgatgtttatcgtaaaatcagaaatacattaagatttatgttaggtaatattaatgatttcaatcctgacacagatagcattcctgaatcagagttattagaagtggatcgttacttgctaaatcgtttacgtgaatttactgcaagtacgattaacaactatgaaaactttgactacttaaatatttatcaagaagttcaaaactttatcaatgttgagttaagtaatttctatttggattacggtaaagatattttatatattgaacaacgtgattctcatatccgtcgtagtatgcaaacagtgttatatcaaattttagttgatatgacgaagttgttagcaccaatcttagtgcatacagctgaagaagtttggtctcatacaccacatgttaaagaagaaagtgttcacttagcagacatgcctaaagttgtagaagtagatcaagctttattggataaatggcgtacatttatgaatttacgtgatgatgtgaaccgtgcattagaaactgctcgtaatgaaaaagttattggtaaatcattagaagctaaagttacgattgctagtaacgataaatttaatgcatctgaattcttaacttcatttgatgcattacatcaattatttatcgtgtcacaagttaaagttgtagataagttagatgatcaggcaacagcttatgaacatggtgatattgtcatcgaacatgcagatggtgaaaaatgtgaaagatgttggaactattcagaggatcttggtgctgttgatgaattgacgcatctatgcccacgatgccaacaagttgtaaaatcacttgtataattgaaattgtataaagtactcatacagatgatatagattaaagctctcttcataatcatgttgtagtttttgttgacatgatgaagagagtttttttgtgaaaaaaaatgaccaagttaccggtcatatgtgtaaaaaaatgtgcgatttactaaaataaaaattattcaggaatggtacaaattctctgaggcttataaatgcgttatagttgctattctcaattatgttcgcgataattttaagtaaaagtaagcacagatattgaatttgataggagttaattgaatgtatcataacagtaacgcaaactttgtaaatggtatcactctaaatgtgagagataagaatgaattaaagccattttatgaggacatattaggattaaatattataaatgagacattaacatcgatacaatatgaagtaggtcaaaataatcatgtcattacacttgttgaattacaaaatggacgtgaacctttaatgtccgaagcgggactgtttcatatcgcaattaaactacctcaaattagtgatttagctaatttactaattcatttaagcgaatatgatattccagttaacggaggtatacagcctgcttcgttatcattgttttttgaagacccggaaggaaacggtttaaaattttatgttgataaagacgaagcgcaatggacgaggcaaaatgatttagtaaaaattgatattagaccattaaatgtaccgagattagtgagtcatgcaacaaaattgttatggttaggtattccagatgacgctattataggtgcattgcatattaagacaattcatttatcagaggtaaaagactactacctcgattattttggattagagcaatcggcatatatggatgattattcaatatttttagcatcgaatggctattatcaacatttggccatgaatgattgggtatcagcaacgaaacgtgtagaaaattttgatacgtatggattagcaattgttgactttcattatcctgaaacaacacatttaaatttacaaggtccggatggtatctattatcgctttaatcatatcgaagttgaagattagtatatactttgaatggacgaaccatataatgaatcgtttttaatgatctttttatacaagctatgaaggcagtcttatgaggtttcccatgaggctgctttcctaatttttaatgtcatcttaaatatgataaatgaataattaagttcatatttaatgtcaaaacatagtagtttatcaagtattgagttagtaacactagatttaatgtaatatgcttactttttttattagcaggtgtaagctataatataaagagttgtcttatggacgattgattggaggaacgaaaatgcacaaaaaatattttattggcacttccattttaatagcagtatttgtcgttatatttgaccaagttactaaatatattatagctactacaatgaaaattggagattcatttgaagtgataccgcactttttaaacataacatcacatcgaaataatggtgctgcatggggaatattgagtggaaaaatgacatttttctttattattaccattattatattaatagccttagtatatttctttattaaagatgctcaatataatttgtttatgcaagttgctattagtttactttttgcaggtgcacttggaaactttattgatagagttttaacaggagaagttgttgactttattgatacaaatatttttggttatgattttccaatatttaatatcgcagattcaagtttaacaattggtgtaatattaattattattgccttattaaaggatacttccaataaaaaggagaaggaggttaagtaatggagacttatgaatttaacattacagataaagaacaaacaggtatgcgtgtagataagttgctgcctgaattaaatagtgattggtctcgtaaccagatacaagattggattaaagcaggtttagtcgttgcaaacgataaagttgttaaatctaattataaagtgaaacttaatgatcatatagttgtcactgaaaaagaagtggttgaagctgatattctacctgaaaatttaaatttagatatttattatgaagatgacgatgttgcagttgtatataaaccgaaaggcatggtagttcatccatcaccaggtcattataccaatacattagttaatggtttaatgtatcaaattaaaaatttgtcgggtattaatggagaaattcgtccaggtattgttcaccgtatagatatggatacttctggtttattaatggttgctaaaaatgatattgctcatcgtggacttgtagaacaattaatggataaatctgttaaaagaaaatatatcgctttagttcacgggaatattcctcatgattacggtacaatcgatgcgccaattggtagaaacaaaaatgatcgtcaatctatggctgttgttgatgatggtaaggaagcagtgacacattttaacgtactagaacattttaaagattatacgcttgttgaatgtcaacttgaaacaggacgtacgcatcaaatccgtgtgcacatgaaatatattggcttcccattagttggtgatccaaagtatggaccgaaaaagacattggatattggtggtcaagctctacatgctggacttattggattcgaacatccagtaacaggtgaatatattgaaagacatgctgaattaccacaagactttgaagatttattagatacaataagaaaaagagatgcataattgtgtcgtgctataattacgataacattattatgtaaactataagtatttatcgttttcgtttttttaaaatgaaaatacattataaaatagattaaggttaacatttttactgagaatggttaatttttcaatatagattgacaaagcgcctgattagtattatccttataacagtttaagtacaacataaagagtctttaattgagcgtccagagagacgtcaaagacatgaaaatatagatatatactaaaatgaatcataacactttcacatatgcaagaataagtagtaatactacgattcttctatgtaaataggatgattgtatatactaaacctcatgtcgatattaaagacatgaggttttttgtttctaaattttgaaagggtgagaatatgtctgaacgtatcataatggatgatgccgcaatacaacgtacagtaacgagaatcgctcatgaaattttggagtataacaaaggtactgataatttaattcttttaggtatcaaaacaagaggtgaatatttagcgaatcgtatacaagataaaattcatcaaattgagcaacaacgtatacctactggaacaattgatattacatactttagagatgatatagagcacatgtcatcacttacgacaaaagacgcaatagacatcgacacagatattacagataaagtagtcatcattattgatgatgtgctgtatactggtcgaacggttcgtgcttcacttgatgctattttgctaaatgctagacctattaaaattggtttagctgccttggttgatcgaggacatcgtgagttaccaattcgagcagattttgttggtaaaaatatacctacttctaaagaggaaacggtaagtgtctatttagaagaaatggatcaaagaaatgcagttataattaaataataccccttttaattcagtacgagagactgaaaaaggtgggggagttgaatgataaataagttttcatatgcttgtttatctaacaataccctcatgttcgacaactataagtcaatttctatggacgaaaatgacttgtagtaacttgtcacactttttgtctctttacacatactgatgtaaagagatttttttattatcggaggaaatgaatattatgcaaaatgatgaaatgtttgaacgaacagtaaaacctgtactagatgtaaatgaaaaaccacaaccagcgcaatgggcatttttaagcttacaacatttatttgcgatgtttggcgcaacagtactagtaccattcttaacaggattaccaatatccgcagcgttactagcttcgggaatcggtacattactttatatcttaataacgaaggcgcaaataccagcatacttgggatctagctttgcatttatcacaccaattatcacgggattaagtacgcatagcttaggagacatgcttgtagcattattcatgagtggtgttatgtacgtcattatcgggattctaatcaaattaagtgggacagcatggttaatgaaattattaccaccagtagttgttggaccagtcatcatggtaattggtttaagcttagcacctactgcagtcaatatggcaatgtatgaaaaccctggagatatgaaaggttacaatatcagtttcttaattgttgcaatgataaccttgcttgtaacaatagtcgttcaaggattttttaaaggattcctatctttaattccagtacttgtaggtattatcgtaggttatgtggtagcgatttttatggggattgtgaaatttgatgcaattatgtcagcaaaatggatagatttccctcatatttatctgccatttaaagattatgtaccttcatttcacttaggacttgtacttgtaatgattccgattgtgttcgtaacagtaagtgaacatattgggcaccaaatggtactgaataaaatcgtaggtagaaacttctttgaaaagccaggacttgataaatcaatcattggtgatggtgtttctacaatgtttgccagtattattggtggaccaccaagtacaacatatggtgaaaatatcggtgtattagcgattacaagaatatacagtatttacgtcattggtggtgcagcagttatagcaattgttttagcattcattggtaagttcactgcattaatttcttctatacctacaccagttatgggaggagtatctatattacttttcggtattattgcagcaagtggcttaagaatgctagttgaaagtaaagtagattttgcgaacaatcgaaatttagttatagcttcagtaattttagttgtaggtatcggtaatttagtatttaacttaaaagaaattggtatcaaccttcaaattgagggaatggcattagctgcactttcaggaattattttgaacttaatcttacctaaagagaaaaaacaaaacaattaagatttacaaattaaggagggcgcttttatgaatcatttattatcaatggaacatttatctacagatcaaatatacaaacttatccaaaaggcaagtcaatttaaatctggtgaacgtcaactaccaaactttgaagggaaatatgtcgcaaatttattctttgaaaattctactcgaacaaaatgtagttttgaaatggcagaacttaagctagggttaaaaacgattagctttgaaacatcaacatcatctgtttcaaaaggtgaatctttatatgatacatgtaaaactttagaaagtattggctgtgatttattagtcattagacatccgtttaataactactatgaaaaattagcgaatattaacatcccaattgcgaatgctggtgatggtagtggacaacatccaacacaaagtttgcttgatttaatgacgatatatgaagaatatggatattttgaaggcttgaatgtattgatttgtggagacattaaaaattcacgtgtcgcacgtagtaattaccatagtttaaaagcattaggtgcaaacgtaatgtttaatagcccaaatgcttggattgatgattctttagaagcaccttatgtaaatatagatgatgttatagaaacagtagatatagttatgttattaagaattcaacatgaaagacatgggcttgcagaagaaactagatttgcagcagatgattatcatcaaaagcatggcttaaatgaagtgcgctataacaaattacaagaacatgctattgttatgcatccggcacctgtgaatagaggagtagaaatacaaagcgatttagtagaagcttcaaaatcaagaatttttaagcaaatggaaaatggcgtttacttaagaatggcagtcattgatgaattattaaaataggtaaggggacgaaaatgatgaaattaattaaaaacggtaaagtattacaaaatggcgaattacaacaagcagatattttaattgatggtaaggtaattaaacaaattgcacctgcaattgaaccaagcaatggtgttgacatcatagatgcgaaaggtcactttgtgtcacctggatttgtcgatgttcatgttcatttacgcgaacctggtggtgaatataaagagacaattgaaactggtactaaagctgctgctagaggtggatttacaactgtatgtccaatgcctaacacaagaccggtaccagattctgtagaacattttgaagctttacaaaaattaatcgatgacaatgctcaagtacgtgtattaccttatgcttcaattacaacacgtcaattaggtaaagaattggttgatttcccagcactagtaaaagaaggtgcctttgcgtttacagatgacggtgtaggagtacaaactgcaagcatgatgtatgaaggcatgattgaagctgcaaaagtaaacaaagccatcgtagcacactgtgaagataattcattaatctatggtggtgcaatgcatgaagggaaacgcagtaaagagttaggtataccaggtattccaaacatttgtgaatctgttcaaatcgcaagagatgtactattagctgaagcagcaggttgtcattatcatgtatgtcatgtttctactaaagaaagtgttagagtcattcgtgatgctaaacgcgcaggcattcatgttacagctgaagttacaccacaccatttattgttaacagaagatgatattcctggtaacaatgccatttataaaatgaatccaccattgagaagtactgaagatagagaggctttgttagaagggttactagacggtacaattgactgtatcgcaacagaccatgcaccacatgcacgtgatgaaaaagcacaaccaatggaaaaagcaccattcggaattgttggtagtgaaacagcattcccattattatatacacattttgtaaaaaatggtgattggacattacaacaattagtagattgcttaacaattaaaccatgtgagacatttaatttagaatacggcacattaaaagaaaatggttatgcagatttaacaatcattgatttagatagtgaacaagaaattaaaggtgaagatttcttatcaaaagcagataatacaccatttatcggctataaagtttatggaaatccgatcttaacaatggttgaaggcgaagttaaatttgagggggataaataatatgcaaagcaaacgttatctagtgttagaagacggttctttttacgaaggctaccgtttaggatctgataacttaactgtaggagaaattgtatttaatacagcgatgacaggttatcaagaaactatttcagatccatcatatacaggtcagatcattacttttacgtatccattaatcggtaattatggtatcaatagagacgattttgaatcattagtacctacattaaacggtattgtagtgaaagaagcgagtgcgcatccaagtaattttagacaacaaaagacacttcatgacgttttagaattgcatcaaattccagggattgcaggtgttgatacaagaagtattacgcgtaaaattcgacaacacggtgtgttaaaagctggttttactgatcgaaaagaagatattgatcaacttgtcaaacatttacaacaagtagaattacctaaaaacgaagtagaaatcgtttcgactaaaacaccgtatgtttcgacaggtaaggatctaagtgtcgtacttgtagactttggtaagaagcaaaatattgttcgagaattaaacgtcagaggttgtaacgtcacggttgtaccatatacaactactgccgaagaaattttagcaatggctccagatggcgttatgctatcaaacggaccaggtaatcctgaagatgtagaatgtgcgattccaatgattcaaggaattttagggaaaattccgttctttggtatctgtctaggacatcaactttttgcattatctcaaggagcaagctcatttaaaatgaagtttggtcatcgtggtgcgaaccatccagttaaaaatttagagactggaaaagttgatattacgagtcaaaaccatggatatgcaatagatatagattcgttaaaaagtactgatttagaagttactcatcttgcattaaatgatggtactgtagaaggtttaaaacataaaacattaccagcattttctgttcaataccatcctgaagcaaatccaggaccgtcagattcaaactatctatttgatgattttgtagcaatgatgactaattttaaggaaaaggagcgtcatatcaatgcctaaacgtaatgatatcaaaacaattttagtaatagggtctgggccaattatcataggtcaagcagctgaatttgattatgctggaacacaagcatgtctagctttaaaagaagagggataccgagttattcttgtaaattcaaatccagcgacaatcatgactgataaggaaattgcggataaagtatacatcgaaccgttaactcatgattttatagcgcgaattatacgtaaagagcaacctgacgctttacttccaactttaggtggtcaaacaggtttaaacatggcgattcaactacacgaaagtggtgtgcttcaagataataacgtccaattattaggaactgagctaacatcaattcaacaagcagaagaccgtgaaatgtttagaacattaatgaatgatttaaacgttcctgtgccagagagtgacattgtaaatacagtagagcaagcctttaaattcaaagagcaagtgggatacccgctaattgttagaccagcatttacgatgggtggtaccggaggcggtatttgtcataatgatgaagaattacatgaaatcgtctcaaatggtcttcattatagtccagcaacgcaatgtttattagaaaaatctatcgcaggttttaaagaaatcgaatacgaagtaatgcgtgataaaaacgataatgccatcgttgtatgtaacatggaaaatattgatccagttggtattcatacaggtgattcaattgttgtggctcctagccaaacattatcagatgttgagtatcaaatgttacgtgatgtttcattaaaagttattcgagctttaggtatcgaaggtggttgtaatgttcaattagcattagatccgcattcattcgattattatattatagaagtaaatccgcgtgtatcacgttcatcagcgttagcttcaaaagcaacaggatatcctattgcaaaattagctgctaaaatcgcggttggtctaacattagatgaaatgttaaatccaattacaggaacatcttatgcagcgtttgaaccaactttagattatgtgatttcaaaaataccaagatttccttttgataaatttgaaaaaggagaacgagagcttggcacacaaatgaaagcaacaggtgaagttatggccattggtcgaacttacgaagaatcattgttaaaagcaattcgatcacttgagtatggtgtgcatcacttaggattaccaaatggtgaaagcttcgatcttgattatattaaagaacgtatttcacaccaagatgatgaacgattatttttcatcggcgaagcaattagaagaggcacaacattagaagaaattcataatatgactcagatagattacttcttcttacacaagttccaaaacattattgatattgagcatcaactaaaagaacatcaaggtgatttagaatatcttaaatatgcaaaagattatggatttagtgataaaacaatagcgcatcgctttaatatgacggaagaagaagtatatcaattgcgtatggaaaatgatattaaacctgtttacaagatggttgatacttgcgcagctgaatttgaatcttcaacaccatattattatggtacatacgaaactgaaaatgaatctatagttactgacaaagaaaaaatcttagtattaggctctggaccaattcgaatcggccaaggtgtagaatttgactatgcgacagttcacgccgtttgggcaattcaaaaagcagggtacgaagcgataattgtgaataacaatccagaaacagtatcaacagacttctcaatttctgacaaattatactttgaacctttaactgaagaagatgtgatgaatatcattaatttagaaaaacctaaaggtgtcgttgtacaatttggaggacaaacagcgattaatttagcagacaaattggctaaacatggagttaaaatacttggtacttcactagaaaatctaaatcgtgctgaagatagaaaagaatttgaagcactattaagaaaaattaacgtgccacagccacaagggaaaacagctacatcacctgaggaagcattagcgaatgctgcagaaattggatatccggttgtagtcagaccttcttatgtattaggtggtcgcgcaatggaaattgtagacaatgataaagagttagaaaactatatgacccaggctgtaaaagcgagtccggaacatccggtactagtcgatagatatttaactggtaaagaaattgaagttgatgcgatttgtgatggagaaacggtcattattccaggaatcatggaacatattgaacgtgctggtgtgcatagtggtgactcaatcgctgtatatccgccacaaactttgacagaagacgagatagcaacacttgaggactatactataaaattagctaaaggtttaaacatcattggcttaatcaacattcaattcgttatagctcacgatggtgtgtatgttttagaagtaaatccacgttctagtagaacggtaccattcttaagtaaaattactgatattccaatggcacaattggcaatgcgagcaattattggtgaaaaactgacagatatgggttatcaagaaggggttcaaccatatgctgagggtgtatttgtgaaagcaccggtatttagttttaataaattgaaaaatgttgatattactttaggacctgaaatgaagtctacaggtgaagtaatggggaaagatactacattagaaaaggcgttattcaaagggttaacaggtagtggtgtagaagttaaagaccacggtacagtattaatgactgtcagtgacaaagataaagaggaggttgttaaattggcacaacgcttaaatgaagttggctataaaattttagcaacgtctggaacagctaataaattagctgagtatgacatacctgcagaagtagtaggcaaaattggtggcgaaaatgatttattaacacgtattcaaaatggtgatgttcaaatcgttataaatacaatgactaaaggtaaagaagtagaaagagatggcttccaaattagacgtactacagttgaaaatggtattccatgtttgacatctttagatacagctaatgccttaacgaatgtaattgaaagtatgacatttacaatgcgtcaaatgtaaatcaatcaaactgtatcggtggggctgtaattaaccatttacttaaagaagtttatattacagcctcattattttgatgaatttcttaacgtaaagggagacatatatgatgaaagatttaccaattattgcattagattttgaatcaaaagaaaaagtaaatcaatttttagatttgtttgatgaatcattattcgtaaaagtaggtatggaactattttaccaagaaggtcctcaattaattaatgagataaaagaaagaggccatgatgtatttttagatttaaaactgcatgatattcctaatacagttggtaaggcgatggaaggactagctaaattgaatgttgatctggtaaatgttcatgctgctggtggcgtaaaaatgatgtctgaggccattaaaggattaagaaaacataatcaacatacaaaaattattgcagtaacacagcttacgtcaacaacagaagacatgttacgacacgaacaaaatatacaaacatcgattgaagaggctgttttaaattatgccaagttagcaaatggagctggtttagatggcgttgtttgttcacctcttgaaagtcgtatgttgactgaaaagttaggtgcatcatttttaaaagtaacaccaggcattagacctaaaggtgcatctcaagatgaccaacaccgtattacgacaccggaagaagcaagacagcttggttcgacgcatattgtagtcggtagaccgattacacaaagtgacaatccagtcgaaagttatcataaaattaaagaaagttggttagtataatggctaaagaaattgcaaaatcattattagatattgaagctgtaacattatcaccaaatgatttatatacatggagttcaggtattaaatcaccgatttactgtgataaccgtgttacgttaggttatcctttagttcgaggcgcaatccgcgatggtttaattaacttaattaaagaacactttcctgaagtagaagttatttctggtactgcaacagctggtattccacatgcagcttttatagctgaaaaattaaaattaccaatgaattatgttcgttcatcaaataagagtcatggtaagcaaaatcaaatcgaaggtgctaaaagtgaaggtaaaaaagtagttgtgatagaagatttaatttcgacaggtggatcttcagtcacagcagttgaagccttaaaacaagcaggtgcagaagtattaggtgttgttgctatctttacttacggtttgaaaaaagcagatgatacatttagcaatattcaactacctttttacactttaagtgattacaatgaattaattgaagtagctgaaaatgaaggtaaaatttctagtgaagatatccaaacattagttgaatggagagacaacttagcataatatagacactagaaggaggaattcaacaaatgaatgacaaaacatctaatgatttatatgggaagataaaacattgtaacgaatttatcaatcattcaaatgattccaatctatctagtagtcacgatgtcgacgaaagttcaacgaagcaaaaacatataaaaaataaaacaactataaatcataatgatgatttatttaaacatgtaaaggatatattacgtaaacaaggacaaatttaaaaacaaaaaagctatagtgtttaatctcatgggctgcttaaccgcatccgaatattacaaacactatagcttttattatataaaaaatttattagcggataattaactttattaaaatccaaccaattaagaatacgagtaataggactaatactggaatcacataatgtaacataacgtccctcctttaacttaattttaattgtaatcaaatttgacaataagtcaaaacattaatacctatgataagtatcatttattaacatatgtatcatatttttaatcttgcgtaatttttatcgttaactatgtgatttaatcaacaggccaataagacatttgtcattcgtgcacctaacggtacgacgcgcttttgtcattttaattatgttaagataatagtagttatagaagttcaatctataggaggcatagcatggatattccaaaaattacgacatttttaatgtttaataaccaagctgaagaagctgttaaactatacacaagcttatttgaagatagtgagattataacaatggctaagtatgctgaaaatggacctggtgatcctgggactgtacaacactcaatatttacattaaatggacaagtattcatggcgattgatgctaatagtggcacagaattaccaatgaatcctgcgatttcattatttgttacagtaaaagatactattgaaatggaacgactatttaatggattaaaagatgaaggtgccattttaatgccaaaaacgaatatgccaccatacagagagtttgcttgggttcaagataagtttggagtaagttttcaattagcattacctgagtaaaaggattcgcacagcgttgaatgataaagaaacactttttcttatgcatgcgttttacctatgtatttctattttaagtacacattagcattttagtttcactcatttttaaaatcacaaagataatttgtaaattaaatgatgatacgttatttaaaaacacgatacttcgtttcaatgaacgcattaaattaaaaataaacacctcgcaaaagaaagtagtcctttcttatggtgaggtgtttatttgtcgacaacttgattatgattgtttcattttttgaatatgttcataatcaggtgtagcatacaaagttttttgattgtcatatgttacaaacccaggctttgcacctgatggtttgtgcacatttttaattaatgtgtaatcaacaggtatttgtccagaattaccagcttttgaaaagtatcctgctaacatagccgcttccttgattgtcgtatcacttggtgcatcattaaatataacgacatgtgaaccaggaatatcttttgtgtgtaaccatgtgtgagtttttttagcttttttatttgttaaataatcattttgcttgttattcttgccaacatatatatcgtcgccatcagttgatacataatgttgtaattgaatctgcgctttctttttcttagtttgatttttacgctgtttcataaagccttgttctgctaattcttctctaatttcatcaatgtcatggacagaaatatgatgtaattgttgttcgattgttgaaaaataatctatattgtctttcgtcaattgaatttgatgttgtaattcacgttctctcgttttcatacgattatattgtttataataatattgagcatttgctgatggggattttgtaggatttaaaggaatgacaacttcttcattcgtataataattcaatgctgtcacttctttatcaccttgcttaattcgatatatattagcagtgatcaattcaccatataactgttcagtatctttatttttagactgctcatattcttcaatcaacttcgctaatttattttgatatttgtgcaactgctgttgaacaaatcgaactaaatcattcgcacgttgtttaacgcgttcccgttcgccacgcgcatcataaaaacgatcaagtaaatcatttaatgaatcgtacgtaactgtatcatcattaaattgatttaactttataaaatagaaatcctctttacctgtttcatgatttttatgaaaaataggagtaggtggtaacttggtttctgccattacttcatcgaatgcttctggtaaagttgatgaagtcataaattgacgacgattaacgatttcattcgtaattaaagggctaaatccttcaaactgattcaataattgtttagcaatattacctgcgttaaaatcgatatattttaacacctctgcacctgtaatatcatacggattcattttgtgctgagtaggtggtgcttcataattaaaacctggcattactgtacgatagtgattcgtatttggtgttaagtgtttaaatccttcaattattttgcgattttcatctactaaaattaagttactatgtttacccataatctcaaggatgacagtgcggtaaatagtatcgccaatttcatctttactctttatatcgatttcaatacgacgatcattaccaatttgcttaatcgattcgataataccaccttctaagtgttttctaaaaacacgcgcaaacatgggtggattaaatggattatcatattttttagtagtcaattggaatcttgaaaagtttggatggattgacaataacaattgatggttttgtctattttgacgtacaaccattagtatcgtgtcattatcaggttgattgattttgtgaacgcgtcctgttgttaaaaattgtagagactcaaccattttctttgtaaataagccatcataagccataatttatcttccaccttcttcatatcattcgtttcattttaacatgattgtaacttttcggtatagttattgaatcatacattatgccacacatttaacattatctaaaagttcgcaattcaatttatttaattaaaattaatcgtgcaatataacgatattgttagacctaatagaaattatggcatgcaatttcaaatatgctatacaatataaagaacaatgtgatatcatatttaaataatagaagattagcttagagaggtcgtaaggcatggataatgaaaaaggattgttaatcgttttatcaggaccatctggagtaggtaaaggtactgttagaaaacgaatatttgaagatccaagtacatcatataagtattctatttcaatgacaacacgtcaaatgcgtgaaggtgaagttgatggcgtagattacttttttaaaactagggatgcgtttgaagctttaattaaagatgaccaatttatagaatatgctgaatatgtaggcaactattatggtacaccagttcaatatgttaaagatacaatggacgaaggtcatgatgtatttttagaaattgaagtagaaggtgcaaagcaagttagaaagaaatttccagatgcgttatttattttcttagcacctccaagtttagatcacttgagagagcgattagtaggtagaggaacagaatctgatgagaaaatacaaagtcgtattaacgaagcacgtaaagaagtcgaaatgatgaatttatacgattacgttgtagttaatgatgaagtagaacttgcgaagaatagaattcaatgtattgtagaagctgagcacttaaaaagagagcgcgtagaagctaagtatagaaaaatgattttggaggctaaaaaataatgttaaatccaccattaaaccaattaacgtcacaaattaaatcaaagtatttaattgcaacaactgcagcgaaaagagcgcgtgaaattgatgaacaacctgaaactgaattattaagtgaatatcattcatttaaaccagttggtagagcgttagaagaaattgctgacggtaaaattcgccctgttatttcaagcgattattatggtaaagaatagtttcgaccattaaaaatatgtgaagcaagacgtacatcaaatacgtctaggcatatccaaatcaaacgcacctatgtaggtgtgtttttttagtttatccaatgattgatgttataataatactaaatttgtatctataaaaaagtaatgagcatttgtgcgcatatgatgatgtaaagcgtaaatgtcatagtgatatttaagggagattgaatatgaagaaaatattgttagccgttacaggtggcattgcggcatataaagcgattgatttgacaagtaagttaacacaatctgggtatgaagttcgcgttatgttaacgaatcacgcgcaaaaatttgtgacaccattagcatttcaagcaataagtcgaaatgctgtttatacagatacttttatagaagaaaatccttcagaaatacagcatattgcattaggtgattgggcagatgcaatcattgttgcacctgcaacggcaaatacaattgcaaaattgagtgtaggtattgctgatgatttggtgacatcaacgttgctagcaacagagacacagaaatttattgcgcctgctatgaatgtgcatatgtatgaaaataaacgcacgcagcaaaatattaatactttaaaagaagatgggtatcattttatcgaaccaggaagcggatttctagcatgtggttatgttgctaaaggacgtatggaagaaccgcttcaaatcgtttctgttattgatgctcattttcaaaatagtaatcgtttagctaatagttcatttcaagataaacgcgcattggttacagctggaccaactattgaagttatcgatccagtcagatttgtatccaatcgttcttctggaaaaatgggttatgcaatagctgaagcattgcgaaatcgaggagctatcgtgacgttagttgctggtcctacaacactagaagatccaaaagatattgaagttattcatgttcaaagtgctgaagaaatgtttgaacaagtgacaagccgatttgacgaacaagatattgttgtaaaagcagcagccgtatctgactatacaccggttgatgtattagaacataagatgaaaaagcaggatggtgatttgtcagtatcttttaaacgtactaaagacattcttaaatatttaggtgaacataaaacatcacagtatttaataggctttgcagcagagactgaagatattgaaaattatgcacaacaaaaattacgcaagaaaaatgcagatgtgattatttcaaataatgttggggatatgtctatcggatttagttctgatgataatgaattgacaatgcattttaaaaataatgaaaaagtaaatatcaagaaaggaaaaaaagtagtattagctgcacaaattttagatgaactagaaactaggtggcaataatgatagcgaaagtcatagtcgatgtcgcgtcgaagagcgttgactataaatttgattatataattcccgaacaactcgaatctgtcatccaacctggtgtgcgtgtaattgtaccttttggaccaagaacgattcaaggttatgtaatggaagtaacagcagaacctgatgcacaacttgacgtttcgaagttaaaaaaaatcatagaagtgaaagatatacaaccagaattaacatcagaattaatagctttaagtgagtggatgggttcaactcatgtcattaaacgtatttctatgttagaagtgatgcttccgagtgctattaaagcgaagtataaaaaagcatttaagatgaaagatgacatagaggtaccttcagctttattacaaaaatttgataagcatggttactattattataaagatgcgcaaaaaaataatgatattcaattacttatgaagttgttaaaagaggatatcgttgaagaaaaaacgattctcacacaaaatataactaaaaaaactaagcgtgctgttcgtgtcattgaagggtatcatcctgatgaagtattagctaaattggagaaagttattaaacaatacgatttgtatgcttacttgtctgaagaacaacataaaacaatatttttaactgatattgaggatatgggcttttcaaaatccagtttagatggacttatcaaaaaaggttatgttgaaaaatatgacgcggttgttgaaagagacccatttaaagatcgtgttttcgaacaagaatcaaaacagcaattaacagaagaccaatttaaagcatatgaagcgattaaagctaaaattgtaagccaagagcaagaaacatttttacttcatggtgtgacgggatcaggtaaaacagaagtatatttacaaacgatagaagatgttttaagccaaggaaaacaggcgatgatgttagttcctgaaatcgctctaacaccgcaaatggttttacgcttcaaacgtcgatttggtgatgacgttgctgtattacattctggcttatctaatggggaacgttatgatgagtggcaaaaaataaggaatggtcgtgcgagagtaagtgttggtgcaaggtcaagtgtgttcgcacctttcaaaaatttaggattaatcattattgatgaagaacatgaatctacatataaacaagaagattatccgagatatcacgctagagaaattgcccaatggcgaagtgaatatcatcactgcccagtcattttaggaagtgcaacaccatgtcttgaaagttatgcacgagctgaaaaaggtgtttatcatttgctatcattaccaaacagagtgaaccaacaagctttacctgaaattgatatcgtagacatgcgtgaagaattgagtgaaggtaatcggtcaatgttttcaaaagatttacgtgaagccatacaattaagattagatcgacaggaacaagttgttttatttttaaatcgacgtggttatgcatcatttatgttatgtcgggattgtggatatgtaccgcaatgcccaaactgtgatatttcattaacgtatcataaaacgacagacttattaaaatgtcactattgtggttaccaagagacgccaccgaatcaatgtccaaattgtgagagtgaacacattcgacaagtaggtactggtactcagaaagttgaagaactattgcaacaagaatttgaagatgcgcgcataattaggatggatgtagatacaacctcaaagaaaggtgcacatgaaaagttattgactgaattcgaaaaaggtaacggtgacattttactaggtactcagatgattgcgaaaggattagattatccaaatattactttagttggtgtgctgaatgcagatacaatgttaaatttacctgattttcgggcgagcgaacgtacttatcaactattaacgcaagtggctggtagagctggtcgtcatgaaaaggcaggtcaagtcatcattcaaacgtataatccagatcattattcaatattggatgttcaaaaaaatgattatttaacattttatcgtcaggaaatggaatatcgtaaattaggaaagtatccaccgtattattatttgattaatttcacaatctcacataaagaaatgaagaaggttatggaagcatcgcaacatgttcataaaattttattacagcatttaacagaaaaagcgcttgtactaggtccatctccggcagcacttgcgagaatcaacaatgaatttagattccaaattttagtgaaatataaaagtgaacctggattattacaagccattcaatttttagatgactattaccatgaaaaatttataaaagaaaaattagcattgaagattgatattgatccacagatgatgatgtaattttttgactaaaacactttaatatcaatgtttcctaagagtatgaaaggtcttgtttttactttaagtacagaaaaagggcagaatatacaactgttaaccatttaaattagcagtttatattctgtctttttatatggctttataacttacgtgattttgatttgattagggatttattagtattttcatttacgaattctgattttaatgtaagtgccatacttaatgataaacaaaagtactaatgattaagcaaactatttttaaatggcaaattgaaatagtgcaaattttacacttataaattaatggctataaactattttatatctatctatgttttaaccacttaaattattagacaaaacaattttcttaaattatcaattaaagtatttaaaaatattgatggttaatgtaaaatatcaatataaataagttttataaatttatgtatgtttatttgattcaaacaaaataacttaagaggagaaagtttatgaaaaagacactgggatgtttacttttaattatgcttttagtcgtagcaggttgttcttttggtgggaatcataaattatcatcaaagaaatcagaagaatcaaaacaagaaactgtaaaaaaagaatcggaagaagagaaagacccaaaagttgcacactataaaaaaaataaggaaaaaatagcgaaagttaaagcagtacctgttttagaaaagatagaaccatttataaccgaaaagacatttatgaatagcacaggtatgcaagggtggaaagattataagtctttaatgaatcaagtgaagttagcagattataattttacaaaagagtctaaaggtgcttcaatggaagatgttgataagttttttaaaaataaaaaaggtgtaaaacgtaaagaagttactacttatgatggtttgaaacaagttaactattggtatgtagataaaagtggtaaaaaaattggtggttcagacacacctgttttttatgctgaaattttaacgaaatataaagatggaaagttgatttatgcatcagttgaacctggatcatattcatattcaaataagaatgcggtaaatctagataaagttgaagaacttgatgatttaagtatgttctctaatctgaaagatcctaaaccagtaccatatagtgttgctcaaatggaaatatcaagcgtcccagttacaagtgtatctttcgtaacaaagggagggaatcataaagatactaatccagagaaagaacaagttgatatgccacaactagcttatttaactgtttcaccacagctataccatgataaagagcatccagatccgcatataattggattagttgccttgccatacttaaatgcatctagagattttgggaacgcgcattactctgttttaaataatctttcaaaagaaatgaaagagaaattagcgagtcgttcattggaccttaataaatagtgtactacattaaataatcgcaataataatcccgataaacaatcagcattactacttatcatatagagttcgtaataactataactctatgattcgcaaataataaatgattgtcatcgggatttatttttatcaatttataaagtgacattaccttgttcatcagcaggtttgaaaacattaatcactgcactaataattgctaaaatgtgtgggatacctgtccaacagaatattaagtgtagaataccttgcatattcttgccggcataaaatttatgaataccaaaactacctaagaacaatgctaataaaatataaataactttgtttacttgcatttcttaccctccagttgaattgcttataatgacattagcttctctttttattagagccacttttagttcaaacattctagtttaagcattcccaatcatctaaatttcagttattcaatccttacaacaaatttatgattacacttcagttgcattgtattattttacgtgtgaaatatacgtaatgaatcacatgacaatctttaaattgaaaaatatacattctatgatgtaaggtcgcatttttaatatatttacgttataatggtttgatgaattttattgaggagtaagagctatggcgattaaaaagttagtacctgcatcgcatcctattttaacgaaaaaagcgcaagcagttataaaatttgatgattcgttaaaaagattattacaagatttagaagatacaatgtatgcacaagaagctgctggcttatgtgcacctcaaattaatcagtcattgcaagtggcaatcattgatatggaaatggaaggattattacaacttgttaatccgaaaattattagtcaatcaaatgaaacgataacagacttagaaggttcaattacattgccagatgtttacggcgaagtgacaagaagtaaaatgatcgttgtcgaaagttatgacgtcaatgggaacaaagttgaactaactgcacatgaagatgtagcaagaatgattttgcatattatagatcaaatgaacggtatcccttttacagaacgtgcggaccgtattttaacagataaagaagtggaggcatattttataaatgactaaaataatatttatgggtacaccagacttttcaacaactgttttagaaatgctcattgaagaacatgatgtcattgcagtcgtaacgcaaccagatcgacctgttggacgtaaacgtgttatgacaccaccaccagttaaaaaagttgcaatgaaatatgatttacctgtatatcagcctgaaaaattaagtggatcagaagaattagaacaattgcttcaattagatgtagatttaattgtaactgctgcttttggacaattattacctgaatcattgttggcattaccaaaacttggcgcaattaatgtacatgcatcattgttaccgaagtatagaggtggtgcaccaattcatcaggcaattatcgatggtgaacaagaaaccggcataacaattatgtatatggttaaaaaattagatgcgggtaatattatttcgcaacaagcaattaaaatagaagaaaatgataatgtcggtacgatgcatgataaattaagcgtattaggagcagatttattaaaagaaactttaccatctattatagagggcacaaatgaaagtgtacctcaagatgatacgcaagcaacatttgcttcgaatattcgacgcgaagatgagcgaattagctggaataaaccaggaagacaagtgtttaatcaaattcgaggattatcaccatggccagttgcttatacaactatggatgacattaacttgaaaatatacgatgctgagctcgttgagactaataagataaacgaacctggaacaattatagacacgactaaaaaagccattattgttgctacaaatgataatgaagctgttgcaattaaagatatgcaattggctgggaaaaagagaatgttagctgccaattatttaagtggtgcgcaaaacacactagtagggaagaaacttatatgatagaaaacgtgagaagtcttgcttttgacacgattcaagatatattaaatgaaggtgcgtatagtaacttgcgtatcaatgaagtgttgtcagaaaatgaattaaatgcaatggataaagctttatttacagaaattgtctacggaaccgttaaaagaaaatatacgttagatttttatttaaagccttttgtgaaaacgaagattaaggcatgggttaggcaattattatggatgagtatttatcaatatgtttatttagataaagttccaaatcacgccatcattaatgaagcagttgaaatagcaaaagaacgaggtggctatcacaacggaaatgtcgtaaatggcattttacgaacaatgatgcgtagtgacttacctgattttaatgaaattgcagatcctaaaaaaagaatggcaatcgagtatagtatgccgaagtggattatagatcattgggcaacacattatggtctcgaaggaactgaaacaattttacagtcatttttagaaacgacatcaacaactgtgcgtgccaacctgacgcgagcatcattagatgatattattgaaaagttgcaagacgaaggttatgacgttgaaaaagatcatgacttaccttattgtctccatataggaggacaaccaattattcattctcgttcatttaaggatggattcgtttcaattcaagataaaagctcaatgtttgttgcacacattatgaatgtagaccgacatgatcacgtattagatgcatgtagtgctcctggcggtaaggcttgtcacattgctgaagttttaatgccagaagggcaagttgacgcttcagatatacatgatcacaaaatagacttaattaattttaatataaaaaaattacgattaacaaatattaaagcctttaaacatgatgcgacaaaaccttatgataaaacatacgataagatacttgttgatgcaccatgtagcggattaggtgttatgagacacaagccagagattaaatatactcaaagcaaacaacatattgagtcactagttgatttacagcttgaaatattggaaaatgtaaaaaacaatgtaaaaacaggtggcgaaatcgtctattcaacatgtacaatagagcaactagaaaatgaaaacgtgatttatacgtttttgaaaaataataaaaacttcgaatttgaaccgtttcaacatccgataactggagagttggtcaaaacgttacaaatcatgccgcaagactttaattcagatggattctttatcactaagataaaaagaaaggacaattaggaatgataactgctgaaaagaaaaagaagaataaatttcttccaaattttgacaagcaatcaatatattcattgcgatttgacgaaatgcaaaactggctcgttgaacaaggtcaacaaaaatttcgagcgaaacagatttttgaatggttatatcaaaaaagagtagattcgattgatgaaatgacgaacttatcgaaagacttacgacagcttttaaaagataactttactgttacaactttaacaactgtagtaaaacaagaaagtaaagacggtacaattaaattcttatttgaattacaagatggctatacaattgaaactgttttaatgagacatgattatggaaattcagtctgtgtaacgacacaagtaggttgtcgaatcggatgtacgttttgtgcttctacacttggaggcttaaaaagaaaccttgaagctggcgaaattgtttcacaagttttaacagttcaaaaagcccttgatgctacagaagagcgcgtatctcaaattgtcataatgggtatcggtgaaccatttgaaaattatgatgaaatgatggactttttaagaatcgtcaatgatgataacagtttaaatattggtgcacgtcacattacagtatcaacatcaggtatcattcctagaatatatgactttgcggacgaagatattcaaattaattttgctgtaagcttacacgccgcaaaagatgaagtgcgatcacgcttgatgccaattaaccgtgcatataatgttgagaagttaatcgaagcaattcaatattatcaagaaaaaacaaatcgtcgtgttacttttgaatatggtctgtttggtggtgtgaatgaccaactagaacatgcaagagaattagcgcatttaataaaaggcttaaactgccatgttaacttaattcctgtcaaccatgttccagaaagaaattatgtaaaaacggctaaaaatgatatctttaaatttgaaaaagaattaaagagactaggaattaatgccacaatacgtcgtgaacaaggttcagatattgacgcagcttgtggtcaattaagagcaaaggaacgacaagtagaaacgaggtaaagacaaatgctagaggcacaattttttactgatactggacaacatagagataagaatgaagatgcgggtggtattttttataatcaaactaatcaacaacttttagttctgtgtgatggtatgggcggccataaagcaggagaagttgcaagtaaatttgttacagatgagttgaaatcccgttttgaagcggaaaatcttatagaacaacatcaagctgaaaattggttgcgtaataatataaaagatataaattttcagttatatcactatgcacaagaaaatgcagaatataaaggtatgggtacaacatgtgtttgtgcacttgtttttgaaaaatcagttgtgatagcaaatgtcggtgattctagagcctatgttattaatagtcgacaaattgaacaaattactagtgatcactcatttgttaatcatcttgttttaacgggtcaaattacgccggaagaagcatttacacatccacaacgtaatattattacgaaggtgatgggcacagataaacgtgtgagtccagatttgtttattaagcgattaaatttttatgattatttattattaaattcagatggattaactgattatgttaaagacaatgaaattaagcgtttgttagtaaaagaaggtacaatagaagatcatggtgatcaattaatgcaattggcattagataaccattcgaaagataacgttactttcatactcgcggctattgaaggtgataaagtatgataggtaaaataataaatgaacgatataaaattgtagataagcttggcggcggtggcatgagtaccgtttatcttgcagaagatacgatacttaacattaaagttgcaattaaggcgatttttataccacctagagaaaaagaagaaacattaaaacgttttgaacgagaagtacataactcatcacagctatcacatcaaaatatagtaagtatgatcgatgttgatgaagaagatgactgttactacttagtaatggaatatattgaaggtccgactttgtctgagtatatagaaagtcatgggccattaagtgttgacacggcgattaattttacgaatcaaatattggatggcattaaacatgcacatgatatgcgtattgtacatagagatattaagccacaaaatatattaattgacagcaataaaacgctgaaaatatttgattttggaattgctaaagctttaagtgagacgtctttaactcagactaatcatgtgttaggtactgtgcagtacttttcaccagaacaagcaaaaggtgaggcaacggatgaatgtacagatatttattctataggtattgtgttatatgaaatgcttgttggtgaaccaccatttaatggagaaactgcagttagcattgcgattaaacatattcaggattctgtgccaaatgtgacaacagatgtacgtaaggatattccgcaatctttaagtaatgtcattttacgtgctacagaaaaagacaaagcaaatcgttacaaaacaattcaagaaatgaaagatgatttgagtagtgttttacatgaaaatcgagcgaatgaagatgtctatgaactcgataaaatgaaaacgatagcggtacctttgaaaaaagaagatctagcaaagcatattagtgaacataagtcgaatcaacctaaacgtgaaacgacgcaagtacctattgtaaatgggcctgctcatcatcagcaattccaaaagccagaaggtacggtgtacgaaccaacacctaaaaagaaatcaacacgaaagattgtgctcttatcactaatcttttcgttgttaatgattgcacttgtttcttttgtggcaatggcaatgtttggtaataaatacgaagagacacctgatgtaatcgggaaaactgtaaaagaagcagagcaaatattcaataaaaataacctgaaattgggtaaaatttctagaagttatagtgataaatatcctgaaaatgaaattattaagacaactcctaatacaggtgaacgtgttgaacgtggtgacagcgttgatgttgttatatcaaaaggccctgaaaaggttaaaatgccaaatgtcattggtttacctaaggaggaagccttgcagaaattaaaatcgttaggtcttaaagatattgcgattgaaaaagtatataataatcaagcaccaaaaggatacattgcaaatcaaagtgtaaccgcaaatactgaaatcgctattcatgattctaatattaaactatatgaatctttaggcattaagcaagtttatgtagaagactttgaacataaatcctttagcaaagctaaaaaagccatagaagaaaaaggatttaaagttgaaagtaaagaagagtatagtgacgatattgatgagggtgatgtaatttctcaatctcctaaagggaaatcagtagatgaggggtcaacgatttcatttgttgtttctaaaggtaaaaaaagcgattcatcagatgtcaaaacgacaactgaatcggtagatgtaccatacactggtaaaaatgataagtcacaaaaagttaaagtttatattaaagataaagataatgacggttcaactgaaaaaggtagtttcgacattactagtgatcaacgtatagacattcctttaagaattgaaaaaggaaaaacagcaagttatattgttaaagtagacggtaaaactgtagctgaaaaagaagtcagctatgatgatatttaaatataattgaagtaaatgtaccgaggtttctatttggaagtctcggtatttttatattgagattgcggtagttttaaaatgcttcatgtcatcatatacaggtgaggattgtctatcaattctgtttcactcccacaatatttataccatttgaaatgatcatttatatattaattttccagtctttgatataataaatgcagtaaaattaatcgagaggtgccattttgaagacaggtcgaatagtgaaatcaattagtggtgtatatcaagtagacgttaatggcgaacgtttcaatacaaaaccacgaggattatttagaaagaaaaaattttcaccggtagttggagatatagtggaatttgatgtacaaaacattaacgaaggctatatccatcaagtgtataagcggaaaaatgagttgaaaagaccacctgtaagtaatatagatacacttgtaattgtgatgagtgctgtcgagccaaatttttcaacacaattattagatcgatttttagttattgcacattcgtaccagttaaatgcgagagttttggtgactaaaaaagataaaacaccaattgaaaagcagcttgaaattaatgagttgttgaaaatatatgaaaatattggctatgagactgaatttattggaaatgatgatgatcgaaaaaaaattgtagaagcttggccagcaggacttatagtacttagtggtcaatcaggtgtcggtaagtccactttcttaaatcattatcgtccagaacttaatcttgagacaaatgatatatcaaaatcattaaatcgaggaaagcatactacaagacatgtcgaactattcgaacgtcaaaacggttatattgcagacacacctggattcagtgctttagattttgatcacatagataaagatgaaataaaagattattttcttgaattaaatcgatatggtgaaacatgtaagtttagaaattgtaatcatatcaaagaacctaattgtaatgttaagcatcaattagagatagggaatattgcgcaatttagatacgaccattatttacaactatttaatgaaatttcaaatagaaaggttagatattaaatgacaaaactatatccatcattattatctgttgattttttggatttacaacatgaattaaaacgacttgaagaagcaggtgtcgacggggttcattttgatgttatggatggtcaatttgtgcctaatatatctattggtttaccaatattagatgcagtaagaaaaggcacaacattacctatagacgtacatttgatgattgaaaatccagaaaagtatattgcatcatttgcagaacatggtgccgatatgatttcaattcatgtcgaatcaacgcctcatatccatcgtgctattcaaatgattaaacatttagataaaaaagctggtgtagtaattaatcctggtacaccgatatcacaaattgaacctattttagacattgttgattatgtactagtgatgacagttaacccagggtttggtggccaatcatttattgatcaatgcgtagaaaaaatagcgggtcttaatgctattaaaatggaacgtcaattaaactttgatattgaagttgatggaggcgtaaataccgatacagcgaaagtttgtgttgaaaatggtgctacaatgctagtaacaggttcatttttctttaaacaagaggattataaaaaagtcacacaagcattgaaaggttgagtgtatatgcatataaatttattatgttctgatcgacacttgccgcaagatatttgggccaaaagtaatgaaggtaaatggggcggtgttgatagaggtgctttgattttattgaagcatcaaattattccttttttctcagtgggagactttgattcagtcagtaaagaagaacgccaacttctaacagaacagttacaaatcaaacctgttcaagctgaaaaagctgatacggatttagctttagcggttgataaagctgttgcacttggatttgatagtattacaatttatggtgcaacaggcggacgattagatcacttttttggggcaattcagttattattgaaaaaagcatattataaacatgatgttcatatagaagttatcgatcaacaaaataaaattgaattattgcctaaaggtcaacatacagttgaaaaagataagagttatccgtacatttcatttataccgatgactgatgatgtagaactttctctagcaggttttaaatataatttagctagacaaatgcttaatataggttctactttaactatttcaaatgaaattgagtctttgcaagcgaaagtaattgtacatgatgggttgattttgcaaattagaagtacagatttaaattaagtatattcaaatttgtgaagaattttaataaagtgcatgagttatttaataaagtgacgtttatagatagaatttatagcattataatagatgaatcacgctgtaattaatgaagattatggcgtgatttattattgaaaggaaaattgtaggtcctagtacattggtttatgtgccaaaatcgatattgaacccataagtccaatttgacagagaaccattattaaacgttttaaccaaattatattgatatttcgaatttcactatgaaccattatatattgttttgtaacaaaaaaagaactaagaggttgagctcttagttcttaagtaaatgcgtcctccacataaggtcacattttttatgtgcaatatatttattaaactctagttactttaccagattttaaagcacgtgcagaaacccaaacttttttaggtttaccgtcaactaggattctaactttttgaaggttagcgttccatctacgtttagtagagtttaaagcgtgtgaacgtctgttaccagtcgaagctttacgacctgttacgaaacattgtttacccatatgagtacctcctttaataaatataaatacacataactacttatatacttaattaagatagcatagtttcatttgaaaaacaatgaataattttcacataaaagtcaaaaatactgagttttgtgatataattgtagactgtgaagttatgtagtatgatattttagagaaataagtgaatgaaacatttaaactttttatttaatgatactacatctattaaaagaaaatgcctatagataatcgtcatgagtgtaaattcagtttactcaaaatataataggtgatttaagcgtaagtcattctgataagttgtaccattgatattttataaaaataatcaatgaaacttaaagcgtttatgactacactaagtggtaaaattttaaaagtgattagggaaaacgaataataaactttgaaatttaggagggacaaagatatgacattagagatttcaaatgattacggtaaaattgatatttcaaacgaagtgattgcttcggttgtaggtggaaaggccgttgaatgttatggtattgtaggtatggcatctagacaacaagttagagatggtattgcggaaatactaggacatgaaaattatgctaaaggcatcaaagtaactgaaaataatggcgtagtggatatagatatgtacattattgtaagttacggtgtgaaaatatctgaagttgccaataatgtacaatcaacagtgaaatatactttggaaaaatcacttaatgtatcagtaaattcaatcaatatatatgtacaaggtgtacgtgtgaataatacaggcaagaaagcttaggaggacaacttgaaatgattagcaaaattaatggtaaattatttgccgatatgattatacaaggggcacaaaatttatctaacaatgcagatttggtagattctttgaatgtgtatccagtgccagatggtgatacaggaacaaatatgaatcttactatgacttcaggtcgcgaagaagtagagaataatttgtcgaaaaatatcggcgaattaggtaaaacattctcgaaaggtttactaatgggtgcaagaggtaactctggtgtcatcttgtcacaattattcagaggattttgtaaaaatattgaaagtgaatctgaaattaatttaaaattgttagctgaaagttttcaagctggtgttgaaacggcatataaagctgttatgaaaccagttgaaggtacaatacttacagttgcaaaagatgctgcgcaagctgcagtagaaaaagcaaataatactgaagattgtatagaattaatggagtacattattgtaaaagccaatgaatcacttgaaaacacaccaaacttattagctgtacttaaagaagttggtgttgttgatagtggcggtaaaggtttgttatgcgtttacgaaggattcttaaaagcgcttaaaggtgaaaaagttgaagccaaagttgcaaagatagataaagatgaatttgtacatgatgaacatgatttccatggtgtaattaatactgaagatattatttatggctattgtactgaaatgatggttcgttttggaaagaataaaaaagcctttgatgaacaagaattcaggcaagatatgagtcaatttggtgattctttattagtcattaatgatgaagaaattgtgaaagttcacgtgcataccgaatacccaggtaaagtgtttaattatggtcaacaatatggtgaattaattaaacttaaggttgaaaatatgagagaacagcaccgtgaagtgattcgaaaagaacagcacacagctaaaccgaaaatggaaacggttgaaacagcaattattactatttctatgggtgaaggtatttcagagatatttaaatcaatgggtgccacacatatcattagtggtggacaaacgatgaatccttctacagaagatatcgttaaagtcattgaacaatcaaaatgtaaacgtgcaattattttaccgaataataaaaatatcttaatggcaagtgaacaagcagcgagtattgttgatgcagaagcagttgttattccaacgaaatctattcctcaaggtataagcgcactattccaatatgatgtggacgcaacacttgaagaaaataaagcacaaatggctgattcagtaaataacgttaaatctggttcattaacgtacgctgttcgtgatacgaaaattgatggcgttgagattaaaaaagacgcgtttatgggcttgattgaagataagattgtaagcagccaaagtgatcaattaacaacggttactgagttgttaaatgagatgttagcagaagatagtgaaatattgactgtgattattggtcaagatgcagagcaagcagttacagataacatgataaactggatcgaagagcaatatccagatgtagaagtggaagttcatgaaggtggacaaccaatttatcaatatttcttttcagtagaataaaaatttaaaataaaaaactaccaatgataaatcatcagttggtagttttttattttgctattttagtgagatagcgggttaaaagtatcattctcgagttgctaacaatgtcatgttcaacttagtcatgataaaataaataacatactaaatgatacgtaaaatcaaataaaacataggtgatttattttggcgaaagtaaacttaatagaaagtccatattctcttttacaattaaaaggtataggtcctaagaaaatagaagtattgcaacaactaaatattcatacagtggaagatcttgttctttatttgccaactagatatgaagataatacagtgattgatttgaatcaagcagaagatcaatctaacgttacgatagaaggacaagtatatacagctccagttgttgcattttttggaagaaataaatcaaaattaactgttcatttaatggtaaataatattgctgtcaaatgtatttttttcaatcaaccgtatttaaaaaagaaaatcgaattaaatcaaactataactgttaaaggtaagtggaatagggttaaacaggaaattactggtaatagggttttctttagttcgcaaggtacacaaactcaagaaaacgcagatgttcaattagaaccagtctatcgtattaaggaaggtattaaacaaaagcaaatacgagaccaaattagacaagcgttaaatgatgtgacaattcatgaatggttaactgatggactaagagaaaaatataaattagagaccttggactttactttgaacacattacatcatcctaaaagtaaagagggtttattacgtgctcgtagaacctatgcatttactgaactgtttttattcgaattacgtatgcaatggctaaatagattagaaaagtcatctgacgaagcaattgaaattgattatgacttagaccaagttaaatcatttattgatcgtttaccttttgaactaactgaagcacagaaatccagtgttaatgaaatttttagagatttaaaagcaccaatacgtatgcatcgattacttcaaggtgatgtaggttcaggaaaaacagttgttgctgcaatttgtatgtatgcgttaaaaacggctggttatcaatcagcattgatggtaccaactgaaattttagcagagcaacatgctgaaagtttaattgctttatttggagattctatgaacgttgcgttgttaactgggtcagtaaaaggtaagaaacgaaaaatacttttagaacaacttgaaaatggtacgattgattgtttaattggaacccatgcattgattcaagatgatgtgattttccataatgttggtttagtaattacagatgaacaacatcgatttggtgtgaatcaacgccagcttttaagagaaaaaggtgcaatgacgaatgtgttatttatgacagcaaccccgataccaagaacactagcaatatcagtttttggtgagatggatgtgtcttcaattaaacaattaccaaaaggtcgtaaacctatcattactacttgggcaaagcatgagcaatacgataaagttttgatgcaaatgacctcagagttgaaaaaaggtcgtcaagcatatgtcatttgcccgcttatagaaagttctgagcatctcgaagatgttcaaaatgttgtcgcattgtacgagtctttacaacagaattatggtgtttcccgtgtagggttattgcatggtaagttatctgccgatgaaaaagatgaagttatgcaaaagtttagcaatcatgagatagatgttttagtttctactactgttgttgaagtaggtgttaatgtaccgaatgcaacttttatgatgatttatgatgcggatcgctttggattatcaactttacatcagttacgcggtcgtgtaggtagaagtgaccagcaaagttactgtgttttaattgcatcccctaaaacagaaacaggaattgaaagaatgacaattatgacacaaacaacggatggatttgaattgagtgaacgagacttagaaatgcgtggtcctggagatttctttggtgttaaacaaagtggattgccagatttcttagttgccaatttagttgaagattatcgtatgttagaagttgctcgtgatgaagcagctgaacttattcaatctggcgtattctttgaaaatacgtatcaacatttacgtcattttgttgaagaaaatttattacatcgtagttttgactaattgccatgctgatttgtcaatttgagtgcaacacttcgttaattgagtgatatgacacttgaactatttaaatgtatagtggtattttaacaatttataaattttcgactaaataatagctaaataatacagttatttgttgagtcggttaaatagaaagtgttatgatatgtgaggaatgtttaagactaggtactaaaaaatgaggggtgagacgttgaaactaaagaaagataaacgtagagaagcaatcagacaacaaattgatagcaatcccttcatcacagaccatgaactaagcgacttatttcaagtgagtatacaaacaattcgtttagatcgcacttatttaaacataccagaattaaggaagcgtattaaattagttgctgaaaaaaattatgaccaaataagttctattgaagaacaagaatttattggtgatttgattcaagtcaatccaaatgttaaagcgcaatcaattttagatattacatcggattctgtttttcataaaactggaattgcgcgtggtcatgtgctgtttgctcaggcaaattcattatgtgttgcgctaattaagcaaccaacagttttaactcatgagagtagcattcaatttattgaaaaagtaaaattaaatgatacggtaagagcagaagcacgagttgtaaatcaaactgcaaaacattattacgtcgaagtaaagtcatatgttaaacatacattagttttcaaaggaaattttaaaatgttttatgataagcgaggataaaattatggttaaattagcaattgatatgatgggtggcgacaatgcgcctgatatcgtattagaagccgtacaaaaggctgttgaagactttaaagatctagaaattatacttttcggtgacgaaaaaaagtataatctgaaccatgaacgaatcgaatttagacattgttctgaaaagattgaaatggaagatgagcctgttagagcgattaaacgtaaaaaagatagctcaatggtaaaaatggctgaagctgtgaaatctggtgaagcagatggatgtgtgtcagcaggtaatactggtgctttaatgtcagctggtttattcattgttggacgtattaaaggtgtagctagaccggctttagtagtaacattgccaacgattgatggaaaaggttttgtctttttagacgttggtgcaaatgctgatgctaaacctgaacacttattacagtatgcgcaactaggggatatttatgctcaaaaaatcagaggtattgataatccgaaaatctcattattaaatataggtaccgagccagctaaaggtaatagtttaacgaaaaaatcatatgagttattaaatcaagatcattcattgaattttgttgggaatattgaagcgaagacattaatggatggcgatacagatgttgtagttaccgatggctatactgggaacatggtccttaaaaatttagaaggtactgcaaaatcaatcggtaaaatgttaaaagatacgattatgagtagtactaaaaataaattagcaggtgcaatattgaagaaagatttagcagaattcgctaaaaagatggattactcagaatacggtggttccgtattattaggattggaaggtaccgtagttaaagcacacggtagttcaaatgctaaagctttttattctgcaattagacaagcaaaaatcgcaggagagcaaaatattgtacaaacaatgaaagagactgtaggtgaatcaaatgagtaaaacagcaattatttttccgggacaaggtgcccaaaaagttggtatggcacaagatttatataacaacaacgatcaagcaactgaaattttaacttcagcagcaaacacattagactttgatattttagagacaatgtttactgacgaagaaggtaaattgggtgaaactgaaaacacgcaaccagctttattgacgcatagttcggcattattagcagcactaaaaaatttgaatcccgattttactatggggcatagtttaggtgaatattcaagtttagttgcagctgacgtattatcatttgaagatgcagttaaaattgttagaaaacgtggtcaattaatggcgcaagcatttccttctggtgtaggaagcatggctgcagtattgggcttagattttgataaagtcgatgaaatttgtaagtcattatcatatgatgacaaaataattgaaccagcaaacattaattgcccaggtcaaattgttgtttcaggtcacaaagctttaattgatgagctagtagaaaaaggtaaatcattaggtgcaaaacgtgtcatgactttagcagtatctggcccattccattcatcgctaatgaaagtgattgaagaagatttttcaagttatattaatcaatttgaatggcgtgatgctaagtttcctgtagttcaaaatgtaaatgcgcaaggtgaaactgacaaagaagtaattaaatctaatatggtcaaacaattatattcaccagtacaattcattaactcaacagaatggctaatagaccaaggtgttgatcattttattgaaattggtcctggaaaagttttatctggcttaattaaaaaaataaatagagatgttaagttaacatcaattcaaactttagaagatgtgaaaggatggaatgaaaatgactaagagtgctttagtaacaggtgcatcaagaggaattggacgtagtattgcgttacaattagcagaagaaggatataatgtagcagtaaactatgcaggcagcaaagagaaagctgaagcagtagtcgaagaaatcaaagctaaaggtgttgacagttttgcgattcaagcaaatgttgccgatgctgatgaagttaaagcaatgattaaagaagtagttagccaatttggttctttagatgttttagtaaataatgcaggtattactcgcgataatttattaatgcgtatgaaagaacaagagtgggatgatgttattgacacaaacttaaaaggtgtatttaactgtatccaaaaagcaacaccacaaatgttaagacaacgtagtggtgctatcattaatttatcaagtgttgttggagcagtaggtaatccgggacaagcaaactatgttgcaacaaaagcaggtgttattggtttaactaaatctgcggcgcgtgaattagcatctcgtggtatcactgtaaatgcagttgcaccaggttttattgtttctgatatgacagatgctttaagtgatgagcttaaagaacaaatgttgactcaaattccgttagcacgttttggtcaagacacagatattgctaatacagtagcgttcttagcatcagacaaagcaaaatatattacaggtcaaacaatccatgtaaatggtggaatgtacatgtaatatatttgagctaaagctcattgacgcagtggttgactggtcatccaatggagaaatgcctgacctagtcaactttgcgggggaaattctaagcaaccaagataaggttccagaatttctccctaagaaacactaatcaataaattgataactaataagcggaacgcctgagctaaaactcattgacgcagtggttgactggtcatccaatggagaattgcctgacctagtcaactttgcgggggaaattctaagcaaccaagataaggttccagaatttctccctaagaaacactaatcaataaattgataactaataagcggaacacctgagctaaagctcaagataaagacgtagtaatcaataaattgataactaataagcggaacacctgagctaaagctcatgcataagaaacagtaatcaataaattgataactgtttctaaaatttctacttgttttttagaatttaaaatgggaaaatataatagtctatgtataggcatttttaaaggaggtgaatcgacgtggaaaatttcgataaagtaaaagatatcatcgttgaccgtttaggtgtagacgctgataaagtaactgaagatgcatctttcaaagatgatttaggcgctgactcacttgatatcgctgaattagtaatggaattagaagacgagtttggtactgaaattcctgatgaagaagctgaaaaaatcaacactgttggtgatgctgttaaatttattaacagtcttgaaaaataataaatcttacatctgggtcgtcagtattgtcgactcagtttttttctttaattatcaatagttttaacgtaaaattaaagatgattcaagagcaacatataaaggagataaaataatgtctaaacaaaagaaaagtgagatagttaatcgttttagaaagcgctttgatactaaaatgacagagttaggctttacttatcaaaatattgatttataccaacaagcattttcgcattcgagttttattaatgattttaatatgaatcgtttagaccataatgagcgtttagagtttttgggtgatgcggtattagaattgacggtttcacgatatttatttgataaacatcccaacttgccagaagggaatttaacaaaaatgcgtgccactattgtatgtgagccctcacttgtaatatttgcgaataaaattggattgaacgaaatgattttacttggtaaaggtgaagagaaaacagggggacgtacaagaccatcattaatatcagatgcattcgaagcatttattggggcattgtatttggatcaaggactagatatagtttggaaatttgctgagaaagtcattttcccacatgtagaacaaaatgagttattaggcgtggtagattttaaaacacaattccaagaatatgtgcaccagcaaaataaaggtgatgtaacctataatttaataaaagaagaaggaccggcacatcatcgtctattcacttcagaagttattctgcaaggggaagcaatagctgaaggtaaagggaaaacgaaaaaagaatcagaacaacgtgctgctgaaagtgcctataagcaattaaagcaaattaaatagaaatttttatgatacgacatataggtgttcgatttaggatttatggaagaatttttaatattttatggaacaacctcgaaatttaatatacaaatactaaaatatcgtatacgtatgttctttaaaattgtgataaggagtttaggatggtttatttaaaatcaatagatgccattggatttaagtcttttgcagatcaaaccaatgttcaattcgataaaggtgtaactgcaattgttggtccaaatggaagcggtaaaagtaatattacagatgctattaaatgggtgttgggtgaacaatcggctaaatcattacgtggctcaaaaatggaagatattatcttctcaggtgcagaacatcgcaaagctcaaaattatgctgaagtacagttaagattagataatcattctaaaaagctcagtgttgatgaaaacgaagttattgtaacaagaagattgtatcgaagtggtgaaagtgagtactacataaataatgaccgtgcaagattaaaagatattgccgatttatttttagattctggattggggaaagaagcatatagcattatctcgcaaggtagagttgatgaaatactaaatgctaaaccaattgatagacgtcaaattattgaagaatctgctggtgtacttaaatataaaaaacgtaaagctgaatcattaaataaacttgaccaaacagaagataatttaacgagagtagaagacattttatatgatttggaaggtcgtgtagaacctctaaaagaggaggcagctatagctaaagaatataagacactttcacatcaaatgaaacatagtgacattgtagttacagttcacgatattgatcaatatacaaatgacaatagacaattagatcaacgtttaaatgatttacaaggtcaacaagcaaataaagaagctgataagcaacgtttaagccaacaaattcaacaatataaaggtcaacgtcatcaacttgataatgatgttgaatcgcttaattatcaattagtaaaagctacggaagcttttgaaaaatatacgggacaattaaatgttttagaagaacgtaagaagaatcaatctgaaacaaatgcacgatatgaagaagaacaagaaaatttaattgagcttttagaaaatatatcaaatgagatttctgaagctcaagatacttataagtctctgaaaagtaaacaaaaagaactcaacgctgtcattcgtgaattagaagaacaactatatgtttcagacgaagcacacgatgaaaaattggaagaaattaaaaacgaatactatacattaatgtcagagcaatcagatgttaacaatgatattcgttttttaaagcatactatagaagagaatgaggctaaaaaatcaagactagattctcgattagttgaagtctttgagcaattgaaagatattcagggtcaaataaaaacgactaaaaaagaataccaacagaccaataaagaactttctgctgtagataaagaaattaaaaatatagaaaaagacctcactgatactaaaaaagcacaaaatgaatacgaagagaaattgtatcaagcatatcgatataccgaaaaaatgaaaacacgtattgatagtttggcaacgcaagaggaagaatatacttattttttcaatggcgtcaaacatattttgaaagctaaaaataaagaattaaagggtattcatggtgcagttgcggaaattattgatgtgccatctaaattaactcaggcaattgaaacagcattaggtgcttcattacaacatgtcattgtagattcagaaaaagatggacgccaggctattcaatttttaaaagaacgtaatttaggtcgtgcgacgtttttaccattaaatgttatacagagtagagtggtagcgactgatattaagtctattgctaaagaggcaaacggatttattagtattgcttcggaagcagtgaaagtagcaccagaatatcaaaatattatcgggaatttattaggtaatacgattatcgttgatcatttaaagcatgcaaatgaattggcacgtgcgattaaatatcgaactcgtattgttactttggaaggtgatattgtaaatcctggtggttctatgactggtggtggcgctcgtaagtcaaaaagtattctgtctcaaaaagacgagttgacaacaatgagacaccaattagaagattacttgcgtcaaacagaatcatttgaacaacaatttaaagagttgaagataaaaagtgatcaattaagtgaactgtattttgaaaaaagtcaaaagcataatacacttaaagagcaagtgcatcattttgaaatggagctcgatagattaactacacaagaaacacaaataaaaaatgatcatgaagaatttgaatttgaaaaaaatgatggttatacgagtgacaaaagtcgacaaactttgagtgaaaaagaaactcatttagaaagtattaaagcatctttaaaacgactagaagatgaaattgaacgctacactaaactttctaaagaaggtaaggaaagcgttactaaaactcaacaaacgttacatcagaaacaatctgatcttgctgtggttaaagagcgtattaaaacacaacaacagacaatagatcgattaaataatcaaagtcaacaaaccaaacatcaattaaatgatgttaaagaaaaaatagcattctttaattcggatgaagtgatgggcgaacaagcttttcaaaatattaaagatcaaattaatggtcaacaagaaacgagaacacgcttatctgatgaattagataaattgaaacaacaacgtattgagttgaatgaacaaatcgatgcgcaagaagctacactacaagtttgtcaccaagatattttagctatcgaaaatcactaccaagatattaaagctgaacaatcaaagctagatgtattaattcatcatgcgatagatcatttaaatgatgaatatcaattgactgttgaacgtgcaaaatctgaatatacgagtgatgaatcgattgacgcattacgtaaaaaagttaaattaatgaagatgtcgattgatgaactaggtcctgtaaacttaaatgcaattgaacaatttgaagagttaaatgaacgttatacatttttaagtgagcaacgtacagatcttcgtaaagctaaagaaacattagagcaaattataagtgaaatggatcaagaggttactgaaagatttaaagaaactttccatgctattcaaggacattttacagctgtgttcaaacaattgtttggtggaggcgatgcagaattgcaattaactgaagccgattatttaacagctggtattgatattgtggtacaaccaccgggtaaaaagttgcaacatttatcgttactaagtggtggtgagcgtgcattaactgctattgctttactatttgcaattttaaaagtaagatctgcaccttttgttatattagatgaggttgaagctgcattagatgaagcgaatgttattagatacgcaaaatatttaaatgagttatcagacgaaacacaattcattgttattacacaccgtaaaggaacaatggaatttgcagataggttatacggtgtaacaatgcaagaatcaggtgttactaaacttgtgagtgtgaatttaaatacaatagatgatgtgttgaaggaggagcaataatgagcttttttaaacgcttaaaagataagtttgcaacaaataaagaaaatgaagaagttaaatccttaacagaagaacaaggtcaagacaaattagaagatacacattctgaaggttcaacgcaggacgtaaatgatttagcagaaaatgctgaagtgaaaaagaagccacgcaagttgagtgaagcggattttgatgacgatggcttaatatcaattgaagattttgaagaaattgaagctcaaaaaatgggtgctaaatttaaagcaggactcgaaaaatctcgtcaaaatttccaagaacaattaaataatttgatagcgagatatcgtaaagtagatgaagacttttttgaagctttagaagaaatgctaatcactgcagacgtcggttttaatacagtgatgacgttaactgaagaattacgtatggaagcacaacgacgtaatattcaagatactgaagatttgcgtgaagtcattgttgaaaaaatcgtagagatttaccatcaagaagatgataattcagaagctatgaacttagaagatggtcgtttaaatgtcattttaatggtcggtgtgaatggtgttggtaaaacaacaacaattggaaaattagcttaccgatataaaatggaaggtaaaaaagtaatgttagctgcgggcgatacttttagagcgggtgctattgatcaattgaaagtttggggcgaacgtgttggtgtagatgtaattagccaaagtgaaggttctgatccagctgctgttatgtatgatgcgattaatgccgctaaaaacaaaggtgttgatattttaatctgtgataccgctggacgtttacaaaataaaacaaatctaatgcaagaattagaaaaagttaagcgtgtaattaatcgagcagtgccagatgcgcctcatgaagcattactatgtttagatgctacaactggtcagaatgcgttgtcacaagctagaaactttaaagaagtaacaaatgttacaggtattgtattaacgaaattagatggtacagccaaaggtggcatcgtattagccattcgtaatgaattgcacattccagttaaatatgtaggtttaggtgagcaattagatgacttacaaccatttaaccctgaaagttatgtcaacggcttattcgctgatatgattgaacaaaatgaagaaataacaacagttgaaaatgatcaaattgtaacagaagaaaaggacgataatcatgggtcaaaatgatttagttaaaacgttacgaatgaattatttgtttgatttttatcaatccttattgacgaataaacaacgtaattatttggaattattttatcttgaagattattctttaagtgaaatcgcagatacttttaatgtgagtagacaagcagtttatgataatataagaagaactggcgatttagttgaagattatgaaaagaaattggaattataccagaaatttgagcaacgccgagaaatatatgatgaaatgaaacaacatttaagtaatccagaacaaatacaacgttatattcaacaattagaagacttagaatagatataaattgagggaggacatcgatatggcatttgaagggttatcagaacgcttgcaagcgacgatgcaaaaaatgcgtggtaagggtaaacttactgaagctgatataaagataatgatgcgtgaagtaagattagcgttacttgaggctgacgtaaactttaaagtggtaaaagaatttattaaaacagtatcagaacgcgcattaggttccgatgtaatgcaatcattaacaccagggcaacaagttattaaaatagttcaagatgaattaacgaagttgatgggtggagaaaatacatcgattaatatgtcaaataaaccacctactgttgttatgatggttggtttacaaggtgctggtaaaacaacaactgcaggtaaattagcattattgatgcgtaaaaaatacaacaaaaaacctatgttagttgcagcagatatttatcgtccagcagcgataaatcaattacaaacagtagggaaacaaattgatattcctgtatacagtgaaggagatcaagtaaagccacaacaaattgtaactaatgcattaaaacatgctaaagaagaacatttagactttgtaatcattgatacagcaggtcgattacacatcgatgaagcattgatgaacgaattaaaagaagtaaaagacattgctaaaccaaacgaaattatgttagttgtcgattcaatgacgggtcaagatgctgtcaatgttgcagaatcttttgacgatcaacttgatgtcacaggtgttaccttaactaaattagatggtgatacacgtggtggtgcagctttatctattcgttcggtgacacaaaaaccaattaaatttgttggtatgagtgaaaagttagatggtttagagctattccatcctgaacgtatggcatcacgtattttaggtatgggtgatgtgttaagtttaattgaaaaagcgcaacaagatgtggatcaagaaaaagcaaaagatttagagaaaaagatgcgtgagtcatcgtttactttagatgattttttagaacaacttgatcaggtgaaaaatctaggaccactggatgatattatgaaaatgattccaggtatgaataaaatgaaagggctagataagcttaatatgagtgaaaagcaaattgatcatattaaagcgattatccagtcaatgacgccggctgaaagaaacaatccagacacattgaatgtatcacgtaaaaagcgtattgctaaagggtctggtcgttcattacaagaagtcaatcgtttgatgaaacaatttaacgatatgaagaaaatgatgaaacaattcactggtggcggtaaaggtaaaaaaggtaaacgcaatcaaatgcaaaatatgttaaaaggtatgaatttaccgttttaatgtttaatataacacgctgatttttgttgcaatgagatgtgcatcccgaaagttatactaaagaatataactttatggggtgcatatttttagatacacaataataattaaaaactgaaattgcggatttgctagaacatgaggttattgttgctaatattaataagttatattggtggaacatgtgcgttagaagtggtaccattcatgtccttacgagataaattaacttaacacgtaggtggtgaaatttactatgaatttttataacctattaacagtctaatttagtaatcacatagttattattgtaagaaaaaggttcaataattttcctggtaaagaaaaaactctttacaaacattcacacacctgttaatattatttcttgtagaaaataaaaattaaaacatgacttaaaggagattttataaatggcagttaaaattcgtttaacacgtttaggttcaaaaagaaatccattctatcgtatcgtagtagcagatgctcgttctccacgtgacggacgtatcatcgaacaaatcggtacttataacccaacgagcgctaatgctccagaaattaaagttgacgaagcgttagctttaaaatggttaaatgatggtgcgaaaccaactgatacagttcacaatatcttatcaaaagaaggtattatgaaaaaatttgacgaacaaaagaaagctaagtaatttagcgtaaaattgttctaacaataagaataactcgtttacactgacagttattactcaatgatacgttgggaatatcacatgttagtaatatagaacgtattgggtaccataatggtgccctttttctttgaattattttcaattaaaatagaagtgttcaaagcatagagttggaggtaatagaatgagagttgaagttggtcaaattgttaacacacatggtattaaaggtgaaattaaagtaaaatccaattcagactttacagacgttcgttttcaacccggtcaagtgctgacagttgtgcataacaataacgaccttgaatatactgttaagtcacatagagtgcataaagggcttcatatgctcacatttgaaggtattaataatattaatgatattgagcatctaaaagggagttctatttatcaagagcgtgatcatgaagatatcgtacttgatgaaaatgaattttattattcagatattataggatgtacagtttttgatgatcaagaaacaccaataggtcgtgtaattaatatatttgaaacaggtgcgaatgatgtgtgggtgattaaaggatctaaagaatatttgattccttatattgctgatgttgtaaaagaagtggatgttgaaaataaaaaaattatcatcacgccaatggaaggattgttggattaatgaaaattgattatttaactttatttcctgaaatgtttgatggtgttttaaatcattcaattatgaaacgtgcccaagaaaacaataaattacaaatcaatacggttaattttagagattatgcaattaacaagcacaaccaagtagatgattatccgtatggtggcggacaaggtatggtgttaaagcctgaacctgtttttaatgcgatggaagacttagatgtcacagagcaaacacgcgttattttaatgtgtccacaaggcgagccattttcacatcagaaagctgttgaattaagcaaggctgaccacatcgttttcatatgtggacattatgaaggttacgatgaacgtatccgaacacatcttgtcacagatgaaatatcaatgggtgactatgttttaacaggtggagaattgccagcgatgaccatgactgatgctattgttagactgattccaggtgttttaggtaatgaacagtcacatcaagatgattcattttctgatgggttattagagtttccgcaatatacacgtccgcgtgaatttaagggtctaacagttccagatgttttattgtctggaaatcatgccaatattgatgcatggagacatgagcaaaagttgatccgcacatataataaaagacctgacttaattgaaaaatatccattaactaatgcagataagcaaatattagaaagatataaaataggattgaaaaaaggttagtattgtgctaacataatctgagtgtggaaacacaaaaatcactatgatccgctgctatatatttgtcgaggcaagaacataggttgaagaggagaatttataatgacaaatcacaaattaatcgaagcagtaactaaatcacaattacgtacagacttacctagtttccgtcctggtgatactttacgtgtacacgtacgtatcattgagggtactcgtgagcgtatccaagtattcgaaggcgttgtaattaaacgtcgtggcggtggcgtttctgaaacgtttacagttcgtaaaatttcatcaggtgttggcgtggaacgtacattcccattacacacaccaaaaattgaaaaaatcgaagttaaacgtcgtggtaaagtacgtcgtgctaaattatattacttacgtagtttacgtggtaaagctgctagaatccaagaaattcgttaatcagcatttaaacaaagctatgtatgagtcaaattcgactcaaacaataaagccatctaggtcacttttatggagtgatatagatggctttttttgctgtttagttaatgtaaagttgataatgtaattctttattccttctctattcataacgtgtttgctcaaaatggttatataaaaaaatctactaagtgccattgaaaaggacttagtagatttattaaatatatacgtagcaacattatttttgtcttgcccatctcgtgaaaataatactacatataatgccaaatatagtaattgttataagtaaataatagtatggtggggtatagctcaattgaatctttgttatatttttaggtgctttaatgccggtcataataccatttacttgttcaactttaagactttgatcacctgatgtcgctttcataccttgattatatgctgttggcaaaacaatatacccagatgaatttttatttttagtaatagtataaccttgctttgtcttactaactttgacagcctctaatgaatttgaagcgtctttaagcgtggtataatcttcgccgtatatcccttttaaatttactcgatacttacctttaggcaatgataatctaatcctatctgaagatttaatacgtatcgttacgggtgttacaaaacgacggtatttataagtgagtttgtttctttcttgtgtatattcattcactttaacatcatgcgctttatctggcgaaagtaattctaaatccatttccaaatacaaatctttatattgatttgatactgattttggcaactgtacagttagaccaccattattttgtttaacttgtaataaatgttttgtaggagattgccaggctgcactatttaatttaattgttgaatctgatagtaaatttttattggctttaaaatgtgtattaacatctttagtattgttagaaacaatcccttgcaacattgcttgttctttatctaatggagattttaattctttattggaaaagaccttatttgtaatatgtgcacttggataatggatggtatttttagaatgaatccaacgaactttattgtctttgtgttcagagttaattttaaatccatatggtaagttatcatcatgattcactctaattcgatcattaacattccaaagtgatagtaaattttgacgattgccaagtagtctataagtgctgtttttatcaattggcatattaatttggagtgtcttgtcataatattttaaaatgtctccattaaaaatactagaatataatgaaatgccattataatgatatataaatggtgaatttaatgcatagtctgacatataatcaatgcgattaaatgggcctgttgcattttgatttatcttttttataagctggtttacatagttactatgataatcatgttgtttcaacgttgatattgattgttgataaggtttgattgccatatttttgttgttatctaaaatgacgatttgttgaatcataacgattaatactaatattgcaacggttaattttttataacgccataaactaaattttaaaataacggcaagcaccattagcaggataatacctactataagtgcaagtgggtgtgtcggtgatagtaatacataaagtaatgcgatgatgcatacgggtattgttctgattaaataatatttcatatttaatgttgataaatgttgaataaacaatccgcaaagagcacttgatgatagtgctaagatatacacccaacgcctttctggaaatgaaaaaccattaaaagcactgtcgaaatactgtgataatgaacctataaataatatccatgttactattgcgaaaagtctataaaagtaaaaacgatacagtttgaatgacaataatgcaacgatagtaagaattgaaatcgtaatataaaatccatcgctaaagaaaaaataatgataatcaagtggtgtcaaaaacggtatatcaacattgggattttgctttctgtcattttccaaaaacgcagaaatgccagtgaataaaccaaatacacttgataacacactcaaaactgtagcagatatgacgcaaataaatttttgtgttctagagacaatgtcatatttgtaagtgaaaatgagtcgatataaatagtagcaacctataataatagcttgataataactgaaataaaaattgctaaatagtgttaaggctatcgcaacaatgaaaataccgattttgcgttgttgaaaatatctttccaaaccaagaatcgataatggcaataaatataataaatttccataaaatgaccaagtaaaattaaagtatataacgacagttgacatgccgtataaaatcgtagcgatcatatttgttgagcgtttaaagtgtaatattttaaataagtagaaggtcacgacaaatgttatgatagctcgtatcatagccataataagttggtttgtcggccaaaaatgtattgttgtcggattaaatataccaaccgtttctcctattttaatgaatagaaaatttagccacattaaaggtgacagcgaataataatatgatagtcctttcatataatcgccacctaatccaaacgatgcatcatataaactagaaaaactacttagatgttcatacaaatacatttgaaatggcatcatttgacggaatccatctccagccccactaaaaacagtaccattcacaatataatcatagatatgagtagaaaataaaataagcgttaatattacactaatgaaagttataacaaagaattgtttgacgtttgaatttagccacttttttaacacaacattatcctcaactttcaaatttaaaattaagtttaactgaaactaaagttaatgaggttcttgataggtaaagacgaagatgactgtggaacagataccttatcatagttacttaaactttggatcattttcagtttatcattaaacaaatatattgaataataaaaatgtcatactgataaagatgaatgtcacttaataagtaacttagatttaacaaatgatgatttttaattgtagaaaacttgaaataatcacttttacctaaatctaaagcattgttaagaagtgtgacaatgttaaaataaatatagttgaattaatgaatttgttctataattaacaggttatagattttaataatgagaaaagaattgacgaaagtaaggtgaattgaatggttattcaatggtatccaggacatatggcgaaagccaaaagagaagtaagtgaacaattaaaaaaagtagatgtagtgtttgaactagtagatgcaagaattccatatagttcaagaaaccctatgatagatgaagttattaaccaaaaaccacgtgttgttatattaaataaaaaagatatgtctaatttaaatgagatgtcaaaatgggaacaattttttattgataaaggatactatcctgtatcagtggatgctaagcacggtaaaaatttaaagaaagtggaagctgcagcaattaaggcgactgctgaaaaatttgaacgcgaaaaagcgaaaggacttaaacctagagcgataagagcaatgatcgttggaattccaaatgttggtaaatccacattaataaataaactggcaaagcgtagtattgcgcagactggtaataaaccaggtgtgaccaaacaacaacaatggattaaagttggtaatgcattacaactattagacacaccagggatactttggcctaaatttgaagatgaagaagtcggtaagaagttgagtttaactggtgcgataaaagatagtattgtgcacttagatgaagttgccatctatggattaaactttttaattcaaaatgatttagcgcgattaaagtcacattataatattgaagttcctgaagatgcagaaatcatagcgtggtttgatgcgatagggaaaaaacgtggcttaattcgacgtggtaatgaaattgattacgaagcagtcattgaactgattatttatgatattcgaaatgctaaaataggaaattattgttttgatatttttaaagatatgactgaggaattagcaaatgacgctaacaattaaagaagttacgcagttgattaatgcggttaatacaatagaagaattagaaaatcatgaatgctttttagatgagcgaaaaggtgttcaaaatgccatagctaggcgcagaaaagcgttagaaaaagaacaagctttaaaagaaaagtatgttgaaatgacttactttgaaaatgaaatattaaaagagcatcctaatgctattatttgtgggattgatgaagttggaagaggacctttagcaggtccagtcgttgcatgcgcaacaattttaaattcaaatcacaattatttgggccttgatgactcgaaaaaagtacctgttacgaaacgtctagaattaaatgaagcactaaaaaatgaagttactgcttttgcatatgggatcgcgacagctgaagaaatagatgaatttaatatttataaagctactcaaatcgccatgcagcgagctattgatggattatcagtacaaccaacgcatttattgatagacgcgatgacgcttgataatgcactgcctcaagtatctttaatcaagggtgatgcaagaagtgtgtccattgcagctgcaagtatcatggcaaaggtttttcgtgatgattatatgacacagttatctaaaaattatcctgaatacggttttgaaaaaaacgcgggttatggtaccaaacaacatttactagcaatcgatgatattggcattatgaaagagcatagaaaaagctttgaacctataaaatcgttactgtaaatcgtaaaattcaattaaatgataaaaaagtagcatttaagtttacaatagcgcttacattttttataattgtaagggaacttaacctaagtaacaggaggatggaagatgaatatccacgagtatcaaggtaaagaaatatttcgttcaatgggcgttgcagttccagaaggacgagtagcatttactgctgaagaagcggtggagaaagcaaaagaattaaattctgatgtttatgttgtaaaagcacaaattcatgctggaggtagaggtaaagcaggcggagtaaaaattgctaaatctttatcagaggtagaaacatatgcaaaagaattattagggaaaactttggtgacacatcaaactggtccagaaggtaaagaaattaagcgtttatatatcgaagaaggttgtgctattcaaaaagaatattacgttggattcgttattgatcgtgcgactgaccaagtaacattgatggcgtctgaagaagggggcactgagattgaagaagttgctgcgaagactcctgaaaagatcttcaaagaaactatcgatccagtaatcggactttcaccattccaagcaagacgaattgcgtttaatattaatattcctaaagaatctgttaacaaagctgctaaattcttattagcactttataatgtattcattgaaaaagattgttcaatcgtagaaatcaacccattagttacaacagctgatggtgatgtattggcattagatgctaaaattaattttgatgataatgcattattcagacataaagatgttgtagaattacgtgatttagaagaagaagatccgaaagagattgaagcgtctaaacatgatttatcatacattgcattagatggtgacatcggatgtatggttaatggtgcaggtttagccatggcaacaatggatacgattaatcatttcggtggaaacccagccaatttcttagatgcaggcggaagcgctactagagaaaaagtaactgaagcatttaaaatcattttaggtgatgaaaatgttaaaggtatttttgtaaacattttcggtggcattatgaaatgtgatgttatcgcagaaggtatcgttgaagctgtaaaagaagtagatttaactttaccactagttgtacgcttagaaggtacaaatgttgagttaggtaaaaaaatcttaaaagactcaggattagcaattgaaccagcagcaacaatggctgaaggtgcacaaaaaattgttaaactagtcaaagaagcataaggaaaggatgggagcactaagatgagtgtatttatagataagaatactaaagtaatggtacaaggtattacagggtctactgcccttttccatacaaaacaaatgcttgattatggcactaaaatagtagcaggtgtgacgcctggtaaaggtggtcaagttgttgaaagcgttcctgttttcaacactgttgaagaagctaaaaatgaaactggggcaacggtttcagtcatttacgttccagcaccatttgctgcagactcaattttagaagcagctgatgcagacttagatatggttatttgtatcactgaacatattcctgtattagacatggttaaagttaaacgctacttacaaggtagaaaaacacgtttagttggtccaaactgtccaggtgtgattacagcagatgaatgtaaaattggtattatgcctggctatattcacaaaaaaggtcatgttggtgtagtatcacgttcaggtacactaacatatgaagcagtgcaccaattgactgaagaaggtattggtcaaactacagctgttggtattggtggagacccagtcaacggaacaaactttattgatgttttaaaagcattcaatgaagatgacgaaacgaaagcagttgttatgattggtgaaatcggtggtacagctgaagaagaagcagctgaatggattaaagcgaatatgacaaaaccagttgtaggctttatcggtggacaaacagctcctcctggaaaacgtatgggacatgctggtgcaatcatttcaggtggtaaaggtactgctgaagagaaaattaaaacattaaatagttgtggtgtgaaaacagcggcaacaccttcagaaattggttcaacattaattgaagctgctaaagaagcaggtatttatgaatcattattaacagttaataaataaagttaaaagatgatattaatggctatagcccattccatactttataaaagtatcggaaatgggctatttgtcgtgcgatgaattttagtacacttttcatatttcggaaaggcaagttaattattttacctccttcaatagctttataaaacaaagcaaatttttattaaaatatatagcgcactatgttataatatttatatattattgcaaggaatgtttcatcatgaataaacaacaaagtaaagtacgctattcaattagaaaagttagtattggaacatttttaaatggtgattatgatggaaaattaatgaagttccaaagtttagatcaaaactggaataatggtggatggcgtaaagcagaggttgcacataaagttgttcataattatgaaaatgatatgatttttattagaccacttaaaaaagcataatttaaatcgaaggcaggacattgaaatatgaaattttcaactttaagtgaagaagaacttaccaactacaccaaaaagcacttcaaacattatacacagtctatagaattatataattatagaaataaaataaatcatgaagcacatattgtgggagtgaagaatgataaaaatgaagttatagctgcatgtttattaacagaggcacgtatttttaaattctacaaatatttctactctcatagaggtcctttacttgattatttcgatgctaaattagtttgttacttttttaaagaattatctaaattcatttataaaaatagaggagtatttattcttgttgatccatatttaatagagaatttaagagatgcaaatggtaggataataaagaattataataattcagtgatagtaaagatgctaggaaaaattgggtatctccatcaaggttatacaacaggatattcaaataaaagtcaaattaggtggatttctgtattggattaaaagataaagatgagaatcaacttttaaaagaaatggaataccaaactagaagaaatataaaaaagactattgagattggtgttaaggttgaagatttatctattgaagaaacaaatcgattttataaattgtttcaaatggctgaagaaaaacatggttttcatttcatgaatgaagattattttaaacgaatgcaagaaatatataaagataaggcaaagttaaagatagcttgtatagatcttaatgaatatcaagataaattaaaaatacaattattgaaaatcgaaaatgaaatgatgactgtgaacagagcattaaatgaaaatccaaattctaaaaagaataaatcaaaattaaatcagttaaatatgcaattatctagtattaataatagaattagtaaaaccgaagaactaatattagaagatgggcctgttttggatttagctgctgctttatttatatgtactgatgatgaagtttattatctatcaagtggatcaaatcctaaatataattagtatatgggcgcatatcatctacaatggcatatgataaaatatgcaaaatcacataatattaataggtataatttttatggaataacaggcgtctttagtaatgaggcggatgattttggtgtacaacaatttaaaaaaggttttaatgcacatgttgaagaattaattggtgatttcatcaaaccagtaagaccaattctatataaatttgcaaaacttatttataaggtttgattataaagtatgttggaaattgaaatttaaaattctttccaacatacttttcactttttaagtcggtattttactccttaaaataacattacatcgagaatgtttttgtattagaaatgtaaaacaaaaatagaatatgattttgtatgattaaaaaaggagttgatttattgattagactatttttgcttaagttatactgggcacacttttcgactaaacaaattcatcaatttttaatggcatatcctaatgtaattaaagaggggggcagaaaaaaagatagttatttatgtgaatgggtgaatagggaagaaaatgttcatttattacgtaaatactatgcttttataaaacttgatcataacgatattattaaagaactgcagaaattaaaagtaagttacattacatatatggatactgaatacccagtgctattaaaagaaatatatcaatttccattacttcttttctataaagggaacatcaaattaataaataatatgcatcatttggctgtagtaggtgcaagagattctacaagttatacccaacagtctttagaatttttattatcaaatgataaaagcaaatatttaacaattgtttccggccttgctcaaggagctgatgcaatggcacatcaaatagctttaaaatacaatctccctacaatagcagttttagcctttggccatcaaacacattatcccaaaagtacattagcattaagaaataaaatagaagaaaaaggtttagttatatccgaatatccaccacatacaccaattgctaaatatagatttcctgagcgcaatagaattatcagcggtttgtcaaaaggggttttaattactgaggctaaggaacaaagtggcagtcacatcacgatagattttgcattagagcaaaatagaaatgtttatgttttacctggatctatgtttaatcctatgacaaaaggtaatttattacgtatccaagaaggtgctaaggtagtattaaacgctaatgatatatttgaagactactatatttaaaactaaaaataacgagttgcttcatatttcttttgttaccctttgtaatttattttttaataaaatctataaaaaatagacagggaaaatgatttgtttagatataaaacgttgacaaaagcaaaattaagcgtttatcatttatctttagtaattagattagcgagggggaaatgacattggcagataatttagtcattgttgaatcgcctgcaaaagcaaaaaccattgaaaagtatttaggtaagaagtataaagttatagcttcaatgggacacgtcagagacttaccaagaagtcaaatgggtgtcgacactgaagataattacgaaccaaaatatataacaatacgcggaaaaggtcctgttgtaaaagaattgaaaaaacatgcaaaaaaagcgaaaaacgtctttctcgcaagtgaccccgaccgtgaaggtgaagcaattgcttggcatttatcaaaaattttagagcttgaagattctaaagaaaatcgcgttgttttcaacgaaataactaaagacgctgttaaagaaagttttaaaaatcctagagaaattgaaatgaacttagtcgatgcacaacaagcgcgtcgaatattagatagattggttggctataacatctcgccagttctatggaaaaaagtaaaaaaagggttgtcagcgggtcgagttcaatctgttgcacttcgtttagtcattgaccgtgaaaatgaaatacgaaactttaaaccagaagaatattggactattgaaggagaatttagatacaaaaaatcaaaattcaatgctaaattccttcattataaaaataaaccttttaaattaaaaacgaaaaaagatgttgagaaaattacagctgcattagatggagatcaattcgaaattacaaacgtgactaaaaaagaaaaaacgcgtaatccagcaaacccatttacaacttctacattacaacaagaggcggcacgtaaattaaactttaaagctagaaaaacaatgatggtcgcacaacaattatatgaaggtatagatttgaaaaaacaaggtacgattggtttaataacatatatgagaaccgattctacacgtatttcagatactgccaaagctgaagcaaaacagtatataactaataaatacggtgaatcttacacttctaaacgtaaagcatcagggaaacaaggtgaccaagatgcccatgaggctattagaccttcaagtactatgcgtacgccagatgatatgaagtcatttttaacgaaagaccaataccgattatacaaattaatttgggaacgatttgttgctagtcaaatggctccagcaatacttgatacagtctcattagacataacacaaggtgacattaaatttagagcgaatggtcaaacaatcaagttcaaaggatttatgacactttatgtagaaactaaagatgatagtgatagcgaaaaggaaaataaactgcctaaattagagcaaggtgataaagtcacagcaactcaaattgaaccagctcaacactatacacaaccacctcctagatatactgaggcgagattagtaaaaacactagaagaattgaaaattgggcgaccatcaacttatgcaccgacaatagatacgattcaaaagcgtaactatgtcaaattagaaagtaagcgttttgttcctactgagttgggagaaatagttcatgaacaagtgaaagaatacttcccagagattattgatgtggaattcacagtgaatatggaaacgttacttgataagattgcagaaggcgacattacatggagaaaagtaatcgacggtttctttagtagctttaaacaagatgttgaacgtgctgaagaagagatggaaaagattgaaatcaaagatgagccagccggtgaagactgtgaagtttgtggttctcctatggttataaaaatggggcgctatggtaagtttatggcttgctcaaacttcccggattgtcgtaatacaaaagcgatagttaagtctattggtgttaaatgtccaaaatgtaatgatggtgacgtcgtagaaagaaaatctaaaaagaatcgtgtcttttatggatgttcgaaatatcctgaatgcgactttatctcttgggataagccgattggaagagattgtccaaaatgtaaccaatatcttgttgaaaataaaaaaggcaagacaacacaagtaatatgttcaaattgcgattataaagaggcagcgcagaaataatatttttatttcctagagacattttaagattgttaaatagaatcattagtgaatcttattttaaagatagtaatggattaatctaaataagtgcggataatataaacataacaacataattaaaagacataaatgacaataaaaggagtatagaaatgactcaaactgtaaatgtaataggtgctggtcttgccggttcagaagcggcatatcaattagctgaaagaggaattaaagttaatctaatagagatgagacctgttaaacaaacaccagcgcaccatactgataaatttgcggaacttgtatgttccaattcattacgcggaaatgctttaactaatggtgtgggtgttttaaaagaagaaatgagaagattgaattctataattattgaagcggctgataaggcacgagttccagctggtggtgcattagcagttgatagacacgatttttcaggatatattactgaaacactcaaaaatcatgaaaatatcacagttattaatgaagaaattaatgccattccagatggatacacaattatcgcaacaggaccacttactacagaaacccttgctcaagaaatagtggacattactggtaaagatcaactttatttctatgatgcggctgctccaattattgaaaaagaatctattgatatggataaagtttacttaaagtcccgttatgataaaggtgaagctgcatatttaaactgtcctatgactgaggatgaatttaatcgcttttatgatgcagtattagaagctgaagttgcgcctgtaaattcatttgaaaaagaaaaatatttcgagggttgtatgccttttgaagtaatggcagaacgtggacgcaagacattactatttggaccaatgaaaccagtaggattagaagatccaaagacggggaaacgtccttatgcagtggttcaattaagacaagatgacgctgctggcacactctacaatattgttggcttccaaacgcatttaaaatggggagctcaaaaagaagttattaaattaattccaggtttagaaaatgttgatattgttagatatggtgtgatgcatagaaataccttcattaactcaccggacgtattaaacgagaaatatgaattgatttcacaaccaaacatacagtttgcgggacaaatgactggtgttgaaggttatgtagaaagcgcagctagcggcttagttgcaggcatcaatcttgcgcataaaatattaggcaaaggtgaggtagtatttccgagagaaactatgattggaagtatggcttactatatttctcatgctaaaaacaataagaatttccaacctatgaatgctaacttcgggttattaccatctttagaaactagaattaaagataaaaaagaacgctatgaagcacaagctaatagagctttggattacttagaaaatttcaaaaaaactttataaaatagttagaaagactagatatgctattcattcttaagtcatcaacgagtaagtaatgactttctaaatggaaaatacttatcctagtctttttaattttggaattgttacgtatttctgacaattgagaattcgtattcaaaaaatatctaaataaataacacgcaataagttgattgatgtaacatgtaagagaatgttttaaataaactttatttaaaagacaacgaaataataaatggcaaggctattaataaagacttttagtaattaatttaaaaaagaggtattctaattaacaggttttccgattagttacaattatttaattctcaaaagatttagaattgattatcaaattactgtaagccctttgctgtatatgctacaattcttattgatggagggtaaatgtattgaatcatattcaagaagcgtttttaaatacattgaaagttgaacggaatttttcggaacatacattgaaatcatatcaagatgacttaattcagtttaatcaatttttagaacaagaacatttacagttgaatacttttgaatacagagatgctagaaattatttgagctatttatattcaaatcatttgaaaagaacatctgtttctcgtaaaatctcaacgttaagaactttctatgaatattggatgacgcttgatgagaacattattaatccatttgttcaattagtacatccgaaaaaagaaaaatatcttccgcaattcttttacgaagaagaaatggaagcgttatttaaaactgtagaagaggacgcttcaaaaagtttacgggatcgagttattcttgaattgttatatgctacaggtatccgtgtttcggaattagttaatattaaaaaacaagatatagatttttacgcgaatggtgttaccgtattaggaaaagggagcaaagagcgctttgtaccgtttggtgcttattgtagacaaagcatcgaaaattatttagaacatttcaaaccaattcagtcatgcaatcatgattttcttattgtaaatatgaagggtgaagcaatcactgaacgcggtgtacgatatgttttaaataatattgttaaacgaacagcaggcgtaagtgagattcatccccacaagctcagacatacatttgcaacgcatttattgaatcaaggtgcagacctaagaacagtacaatcgttattaggtcatgttaatttgtcaacaactggtaaatatacacacgtatctaaccaacaattaagaaaagtgtatctaaatgcacatcctcgagcgaaaaaggagaatgaaacatgagtaatacaacattacatgcaacaacaatttatgctgtaagacataatgggaaagcagctatggctggagatgggcaagtaacgcttggtcaacaagtcatcatgaaacaaacggcaagaaaagtgcgacgtttatatgaaggtaaagtgttagctggtttcgcaggtagtgtagcagatgcgtttacgttatttgaaaaattcgaaacaaaattacaacagtttagtggtaacttagaaagagctgctgttgaattggcacaagaatggcgaggcgataaacaattacgtcaattagaagctatgctaattgtaatggataaagatgctattttagttgtcagtggaactggcgaagttattgccccagatgatgaccttatcgctattggatcaggaggcaactacgcattaagcgcaggacgtgcattgaaacgccatgcatcgcatttgtctgctgaagaaatggcatatgagagcttgaaagtagcggctgatatttgtgtctttaccaacgataatattgttgtcgaaacactataataatcagagaacgataaataattacgagcaattaattttagttaaaagacggaggaatgaaattaatggatacagctggaataagattaactccaaaagaaatcgtatctaaattaaatgaatacatcgttggacaaaatgatgctaaacgtaaagtggcaattgccctacgtaatcgatacagaagaagtttattagatgaggaatcaaagcaagaaatttcacctaaaaatattttgatgattggaccaaccggcgttggtaaaactgaaattgcaagaagaatggccaaagttgtcggcgcgccatttataaaagtagaagctactaaatttactgaggtaggttatgtaggacgagatgttgaaagtatggttagagatcttgttgatgtttcagtaagattagtcaaggcgcagaaaaaatcattggtacaagatgaagcaacagctaaggccaatgaaaaacttgttaagttattagttccaagtatgaaaaagaaagcgtctcaaacgaataatcctttagagtcacttttcggaggtgcaattccaaatttcggacaaaataacgaagatgaagaagaaccacctactgaggaaattaaaacaaaacgttctgaaattaagagacaattagaagaaggcaaacttgaaaaagaaaaggtaagaattaaagtcgaacaagatcctggtgctttaggtatgctaggtacaaatcaaaatcagcaaatgcaagagatgatgaatcaattaatgcctaaaaagaaagttgagcgagaagttgctgttgagacggcaaggaaaatcttagctgatagttatgcggatgaactaattgatcaagaaagcgctaaccaagaagcgcttgaattagcagaacaaatgggtatcatctttatagatgaaatcgacaaagttgcgacgaataatcataatagtggtcaagatgtctcaagacaaggtgttcagagagatattttacctatacttgaaggtagcgttattcaaaccaaatatggtactgtgaatactgaacatatgctgtttataggtgctggagctttccatgtatctaagccgagtgacttgataccagaattgcaaggtcgttttccgattagagttgaacttgatagtttatcggtagaagattttgtaagaattttgacagaaccaaaattgtcattaattaaacaatatgaagcattgcttcaaacagaagaagttactgtaaactttaccgatgaagcaattactcgcttagctgagattgcttatcaagtaaatcaagatacagacaacattggtgcacgtcgacttcatacaattttagaaaagatgttagaagatttatcattcgaagcaccaagtatgccgaatgcagttgtagatattaccccacaatatgttgatgataaattaaaatcaatttcaacaaataaagatttaagtgcatttattctataaaaatatacaaaaggagaaaaattcatgagcttattatctaaaacgagagagttaaacacgttacttcaaaaacacaaaggtattgcggttgattttaaagatgtagcacaaacgattagtagcgtaactgtaacaaatgtatttattgtatcgcgtcgaggtaaaattttaggatcgagtctaaatgaattattaaaaagtcaaagaattattcaaatgttggaagaaagacatattccaagtgaatatacagaacgattaatggaagttaaacaaacagaatcaaatattgatatcgacaatgtattaacagttttcccacctgaaaacagagaattattcatagatagtcgtacaactatcttcccaattttaggtggaggagaaagattaggtacattagtacttggtcgagtacatgatgattttaatgaaaatgatttggtactaggtgaatatgctgctacagttattggtatggaaatcttacgtgagaagcatagtgaagtagaaaaagaagcgcgcgataaagctgctattacaatggcaattaattcattatcttattctgaaaaagaagcgattgaacatatctttgaagaacttggcggtacggaaggcctattaatcgcatcaaaagttgcagatagagttggtattactagatctgtaattgtaaatgcactacgtaaattagaaagtgctggtgtaattgaatcacgttctttaggaatgaaaggtacttttattaaagttaaaaaagaaaaattcttagatgaattagaaaaaagtaagtaggtcgatgagtctgggacataattcaatgtcctagtcgtgacgatgttatcttggcagtagtcaacgaaatgactttgatgattatgttgaagtcatttctttatttttgtctaattttcaatcaaattgatatttcacattaacttgatagaattacctttaaatttatgaaaaaatgcttgaaaaacatttgctttagacacggcattatgttatatttattttcggctataaagccaatacacacatatcaaacgtgattgtgtaaagggtgcaatatttatatattgtctttacaatagtttgctatggaggtaattaaccaataggaggaatttataatggcagtaatttcaatgaaacaattactagaagcgggtgttcacttcggtcaccaaacacgtcgttggaacccaaaaatgaaaaaatatatcttcactgagagaaatggtatttatatcatcgacttacaaaaaacagtgaaaaaagtagacgaggcatacaacttcttgaaacaagtttcagaagatggtggacaagtcttattcgtaggaactaaaaaacaagcacaagaatcagttaaatctgaagcagaacgtgctggtcaattctacattaaccaaagatggttaggtggattattaactaactataaaacgatctcaaaacgaatcaaacgtatttctgaaattgaaaaaatggaagaagatggtttattcgaagtattacctaaaaaagaagtagtagaacttaaaaaagaatacgaccgtttaatcaaattcttaggcggaattcgtgatatgaaatcaatgcctcaagcattattcgtagttgacccacgtaaagagcgtaatgcaattgctgaagctcgtaaattaaatattcctatcgtaggtatcgttgacactaactgtgatcctgacgaaattgactacgttatcccagcaaacgacgatgctatccgtgcggttaaattattaactgctaaaatggcagatgcaatcttagaaggtcaacaaggcgtttctaatgaagaagtagctgcagaacaaaacatcgatttagatgaaaaagaaaaatcagaagaaacagaagcaactgaagaataatcaactgttgaatctgacttagatatagtttaaatgggtgataagatattaatgcttatcaccttttttaaaaagaaaatcgaggcaaattacaaatattcaattagagtattggcaatcttgcctataataatgctaaaatcataatatataaaatgataacttattggaggaataatgaatggcaactatttcagcaaaacttgttaaagaattacgtgaaaaaactggcgcgggtatgatggattgtaaaaaagcgctaactgaaactgatggtgacatcgataaagcgattgattacctacgtgaaaaaggtattgctaaagcagctaaaaaagcagaccgtattgcggctgaaggtttagtacatgtagaaactaaaggtaacgacgcagttatcgttgaaattaactctgaaacagactttgttgctcgtaacgaaggattccaagagttagttaaagaaatcgctaatcaagtattagatacaaaagctgaaactgttgaagctttaatggaaacaactttaccaaatggtaaatcagttgatgaaagaattaaagaagcaatttcaacaatcggtgaaaaattaagtgttcgtcgttttgctatcagaactaaaactgataacgatgctttcggcgcttacttacacatgggtggacgcattggtgtattaacagttgttgaaggttcaactgacgaagaagcagcaagagacgttgctatgcatatcgctgcaatcaaccctaaatatgtttcttctgaacaagttagcgaagaagaaatcaaccacgaaagagaagttttaaaacaacaagcattaaatgaaggtaaaccagaaaacatcgttgaaaaaatggtggaaggacgtttacgtaaatacttacaagaaatttgtgctgtagatcaagacttcgttaaaaaccctgatgtaacagttgaagctttcttaaaaacaaaaggtggaaaacttgttgacttcgtacgctatgaagtaggcgaaggtatggaaaaacgcgaagaaaactttgcggatgaagttaaaggacaaatgaaataatctgtcataaagtaaaacaaggaagaagacacctttaatgttgctttattaaaatgtaaatcattctaataaaacgacaactgtgtcttctttacttgtatatgttacatatattcacgatagagaggataagaaaatggctcaaatttctaaatataaacgtgtagttttgaaactaagtggtgaagcgttagctggagaaaaaggatttggcataaatccagtaattattaaaagtgttgctgagcaagtggctgaagttgctaaaatggactgtgaaatcgcagtaatcgttggtggcggaaacatttggagaggtaaaacaggtagtgacttaggtatggaccgtggaactgctgattacatgggtatgcttgcaactgtaatgaatgccttagcattacaagatagtttagaacaattggattgtgatacacgagtattaacatctattgaaatgaagcaagtggctgaaccttatattcgtcgtcgtgcaattagacacttagaaaagaaacgtgtagttatttttgctgcaggtattggaaacccatacttctctacagatactacagcggcattacgtgctgcagaagttgaagcagatgttattttaatgggcaaaaataatgtggatggtgtatattctgcagatcctaaagtaaacaaagatgcggtaaaatatgaacatttaacgcatattcaaatgcttcaagaaggtttacaagtaatggattcaacagcatcctcattctgtatggataataacattccgttaactgttttctctattatggaagaagggaatattaaacgtgctgttatgggtgaaaagataggtacgttaattacaaaataaatttagaggtgtaaaataatgagtgacattattaatgaaactaaatcaagaatgcaaaaatcaatcgaaagcttatcacgtgaattagctaatatcagtgcaggaagagctaattcaaatttattaaacggcgtaacagttgattactatggtgcaccaacacctgtacaacaattagcaagcatcaatgttccagaagcacgtttacttgttatttctccatacgacaaaacttctgtagctgacatcgaaaaagcgataatagcggctaacttaggtgtcaacccaacaagtgatggtgaagtgatacgtattgcagtacctgccttaacagaagagcgtagaaaagagcgcgttaaagatgttaagaaaattggtgaagaagctaaagtatctgttcgaaatattcgtcgtgatatgaatgatcagttgaaaaaagatgaaaaaaatggcgacattactgaagatgagttgagaagtggtactgaagatgttcagaaagcaacagacaattcaataaaagaaattgatcaaatgattgctgataaagaaaaagatattatgtcagtataaaactaatatacaatgacatattaaaatgccagtattaaacaataatgtaacatttaaaatgggcatgtttaattaaatcaaagatgcatgtgataatttaaattcacaatgagcataaaaatggtgtttaaacaagttaattaaacatatactttataaataataggcattaggtatattgctataataaagttatgtaatttttaacctcagtatgtatgtcacatttctggtgtaaactgtaccgagtcagactttggtacagtttttttatttgcttattcaatgcattaaatgagtatgataaaatgataatgattgtttagtaacttatactatatgacagagatgatcaggctcggaggaaagaccatgtttaaaaagctaataaataaaaagaacactataaataattataatgaagaattagactcgtctaatatacctgaacatatcgctattattatggatggtaatgggcgatgggctaagaagcgaaaaatgcctagaattaaaggtcattacgaaggtatgcaaacaataaaaaaaattactagggtagctagtgatattggtgttaagtacttaactttatacgccttttccactgaaaattggtcaagacctgaaagtgaagtaaattatattatgaatttgcctgtcaatttcttaaagacatttttaccggaactaattgaaaaaaatgtcaaagttgaaacaattggatttactgataagttgccaaaatcaacgatagaagcaattaataatgctaaagaaaagacagctaataataccggcttaaaattaatatttgcaattaattatggtggcagagcagaacttgttcatagtattaaaaatatgtttgacgagcttcatcaacaaggtttaaatagtgatatcatagatgaaacatatataaacaatcatttaatgacaaaagactatcctgatccagagttgttaattcgtacttcaggagaacaaagaataagtaatttcttgatttggcaagtttcgtatagtgaatttatctttaatcaaaaattatggcctgactttgacgaagatgaattaattaaatgtataaaaatttatcagtcacgtcaaagacgctttggcggattgagtgaggagtagtatagtatgaaagttagaacgctgacagctattattgccttaatcgtattcttgcctatcttgttaaaaggcggccttgtgttaatgatatttgctaatatattagcattgattgcattaaaagaattgttgaatatgaatatgattaaatttgtttcagttcctggtttaattagtgcagttggtcttatcatcattatgttgccacaacatgcagggccatgggtacaagtaattcaattaaaaagtttaattgcaatgagctttattgtattaagttatactgtcttatctaaaaacagatttagttttatggatgctgcattttgcttaatgtctgtggcttatgtaggcattggttttatgttcttttatgaaacgagatcagaaggattacattacatattatatgcctttttaattgtttggcttacagatacaggggcttacttatttggtaaaatgatgggtaaacataagctttggccagtaataagtccgaataaaacaatcgaaggattcataggtggcttgttctgtagtttgatagtgcctcttgcaatgttatattttgtagatttcaatatgaatgtatggatattactaggagtgacattgattttaagtttatttggtcaattaggtgatttagtggaatcaggatttaagcgtcatttcggcgttaaagactcaggtcgaatactacctggacacggtggtattttagaccgatttgacagctttatgtttgtgttaccattattaaatattttattaatacaatcttaatgctgagaacaaatcaataaacgtaaagaggagttgctgagataatttaatgaatctcagaactccttttgaaaattatacgcaatattaactttgaaaattagacgttatattttgtgatttgtcagtatcatattataatgacttatgttacgtatacagcaatcatttttaaaataaaagaaatttataaacaatcgaggtgtagcgagtgagctatttagttacaataattgcatttattattgtttttggtgtactagtaactgttcatgaatatggccatatgttttttgcgaaaagagcaggcattatgtgtccagaatttgcgatcggtatggggccaaaaatttttagttttagaaaaaatgaaacactttacactattaggttattgcctgttggtggatatgttcgtatggcaggagatggcttagaagaaccaccagtcgagcctggtatgaacgttaaaattaaactgaatgaagaaaatgaaataacacatatcatattagatgatcatcataagtttcaacaaattgaagcgatcgaagttaaaaaatgtgattttaaagatgacttattcatagaaggtatcactgcttatgataacgaaagacatcattttaaaattgctagaaagtctttctttgttgaaaatggtagcttagttcaaattgctccgagagacagacaatttgcacataaaaagccatggccgaaatttttaacattatttgcaggaccgttatttaactttatattagctttagtcctatttattggtcttgcatattatcaaggtacacctacgtctactgtagaacaagtcgcagataagtatccagctcaacaagcaggcttacaaaaaggcgataaaattgtccaaattggcaaatataaaatatctgaatttgatgatgttgataaggcgttagataaagttaaagataataagacaactgttaaatttgaacgtgatggtaaaacaaagtcggttgaattaacacctaaaaagactgaaagaaaactgactaaagtaagttcagagacgaagtatgttctcggattccaaccagcgagtgaacgtacgctcttcaaaccaattgtatatggatttgaaagctttttgaaaggtagtacactaatttttacagctgtagtaggtatgttggctagtatatttacgggcggattctcgtttgatatgttaaatggtccggttggtatttatcataacgtagactcagttgttaaagcgggtatcattagcttaattggatacactgcgttattaagtgtaaacttaggtattatgaatttaattcctattcctgcactagacggtggtcgtattttatttgttatatatgaagcgattttcagaaaaccagttaataaaaaagcggaaacaacgattattgctattggtgccattttcatggtcgttattatgatattagtaacgtggaatgatattcgacgatatttcttataatttaggaggataaataattatgaagcaatccaaagtttttataccaacgatgcgtgacgtgccatcagaagcagaagcacaaagtcatcgtttattattgaaagcgggtttgataaagcaaagtacaagtgggatttatagttatttaccgctagcaacacgtgtgttaaataatattactgcaattgtgcgacaagaaatggaacgtatcgattctgttgaaattttaatgccagcgttacaacaagctgaattatgggaagaatcaggacgttggggtgcatatggcccagaattaatgcgtttacaagatagacatggaagacaatttgcattaggtccaacacatgaagaattagttacatcaatagtaagaaatgaattgaaatcatacaaacaattaccgatgacattattccaaattcaatctaaattccgtgatgaaaagagaccacgttttggtttacttcgtggtcgtgaatttattatgaaagatgcgtattcattccatgctgacgaggcatcattagatcaaacgtatcaagatatgtatcaagcgtatagccgtatttttgagagagttggcattaacgcaagaccagtagttgcagattcaggtgctattggcggtagccatacacatgaatttatggcattaagtgctatcggtgaggatacaattgtttacagtaaagaaagtgactatgctgctaacatcgaaaaagcagaagtcgtttacgaaccaaatcataagcatactactgtgcaacctttagaaaaaattgaaacaccaaatgttaagactgcgcaagaattggcagacttcttaggtagaccagtagatgaaatcgttaaaacgatgattttcaaagttgatggcgaatatattatggttttagtgcgtggacatcatgaaattaatgacattaaattaaaatcttatttcggcacagataatattgaattagcaacacaagacgaaattgttaatttagttggtgcaaatcctggttcactaggtcctgtaattgataaagaaatcaaaatttatgcagataattttgtgcaagatttaaataatttagttgtcggggctaacgaagatggttatcacttaattaatgtaaatgtaggtagagacttcaacgttgatgaatatggcgatttccgttttattttagaaggcgaaaagttaagtgatggttcaggcgttgcacattttgctgaaggtattgaagttggtcaagtattcaaattgggtactaagtattcagaatcaatgaatgctacattcttagataaccaaggaaaagcccaacctttaattatgggttgttacggtattggaatttctagaacgctaagtgcgattgttgaacaaaatcacgatgataatggaattgtttggcctaaatcagttactccgtttgatttacatttaatttctattaatcctaagaaagatgatcaacgagaactagcagatgcactatatgctgaatttaatactaaatttgatgtgttgtacgatgatcgtcaggaacgtgcaggtgtcaaatttaatgatgccgatttaattggtttaccactgcgaattgttgttggtaaacgtgcatcggaaggtattgtagaagttaaagaacgtttaacaggtgatagcgaagaagttcacattgatgacttaatgactgtcattacaaataaatatgataacttaaaataattaagatcgaatgaattataagagtaggaaaagctgaaagaaatcagatgcttatgtcctgctcttattatttttgatataatgattattcgatgaaaaatgactgaagacatagtataattaaagataaatttgttttaacaatattatgattagacaaatataaagcatttaattttctatcattactatgcctacataatctaaatattgttcgaacacgtaaaagtaatttctatttaaggtggtaattgtcttggcaatgacagagcaacaaaaatttaaagtgcttgctgatcaaattaaaatttcaaatcaattagatgctgaaattttaaattcaggtgaactgacacgtatagatgtttctaacaaaaacagaacatgggaatttcatattacattaccacaattcttagctcatgaagattatttattatttataaatgcaatagagcaagagtttaaagatatcgccaacgttacatgtcgttttacggtaacaaatggcacgaatcaagatgaacatgcaattaaatactttgggcactgtattgaccaaacagctttatctccaaaagttaaaggtcaattgaaacagaaaaagcttattatgtctggaaaagtattaaaagtaatggtatcaaatgacattgaacgtaatcattttgacaaggcttgcaatggaagtcttatcaaagcgtttagaaattgtggttttgatatcgataaaatcatattcgaaacaaatgataatgatcaagaacaaaacttagcttctttagaagcgcatattcaagaagaagacgaacaaagtgcacgattggcaacagagaaacttgaaaaaatgaaagctgaaaaagcgaaacaacaagataacaacgaaagtgctgtcgataagtgtcaaattggtaagccgattcaaattgaaaatattaaaccaattgaatctattattgaggaagagtataaagttgcaatagagggtgtcatttttgatattaacttaaaagaacttaaaagtggtcgtcatattgtagaaattaaagtgactgactatacggactctttagttttaaaaatgtttactcgtaaaaacaaagatgatttagaacattttaaagcgctaagtgttggtaaatgggttagggctcaaggtcgtattgaagaagatacatttattagagatttagttatgatgatgtctgatattgaagagattaaaaaagcgacaaaaaaagataaggctgaagaaaagcgtgtagaattccacttgcatactgcaatgagtcaaatggatggtataccaaatattggtgcgtatgttaaacaggcagcagactggggacatccagccattgcggttacagaccataatgttgtgcaagcatttccagatgctcacgcagcagcggaaaaacatggtattaaaatgatatacggtatggaaggtatgttagttgatgatggtgttccgattgcatacaaaccacaagatgtcgtattaaaagatgctacttatgttgtattcgacgttgagacaactggtttatcaaatcagtatgataaaatcatcgagcttgcagctgtgaaagttcataacggcgaaatcatcgataagtttgaaaggtttagtaatccgcatgaacgattatcggaaacgattatcaatttgacgcatattactgatgatatgttagtagatgcccctgagattgaagaagtacttacagaatttaaagaatgggttggcgatgcgatattcgtagcacataatgcttcgtttgatatgggcttcatcgacacgggatatgaacgtcttggatttggaccatcaacgaatggtgttatcgatacattagaattatctcgtacgattaatactgaatatggtaaacatggtttaaatttcttagctaaaaaatacggtgtagaattaacgcaacatcaccgtgccatttatgatacagaggcaacagcttacattttcataaaaatggttcaacaaatgaaagaattaggcgtattaaatcataacgaaatcaacaaaaaactcagtaatgaagatgcatataaacgtgcaagacctagtcatgtcacattaattgtacaaaatcaacaaggtcttaaaaatctatttaaaattgtaagtgcatcattggtgaagtatttctaccgtacgcctcgaattccacgttcattgttagatgaatatcgtgagggattattggtaggtacagcgtgtgatgaaggtgaattatttacggcagttatgcagaaggaccagagccaagttgaaaaaattgccaaatattatgattttattgaaattcaaccaccggcactttatcaagatttaattgatagagagcttattagagatactgaaacattacatgaaatttatcaacgtttaatacatgcaggtgatacagcgggtattcctgttattgcgacaggaaatgcacactatttgtttgaacatgatggtatcgcacgtaaaatcttaatagcatcacaacctggcaatccacttaatcgctcaactttaccggaagcacattttagaactacagatgaaatgttaaacgagtttcattttttaggtgaagaaaaagcgcatgaaattgttgtgaaaaatacaaacgaattagcagatcgaattgaacgtgttgttcctattaaagatgaattatacacaccgcgtatggaaggtgctaacgaagaaattagagaactaagttatgcaaatgcgcgtaaactgtatggtgaagatctgcctcaaatcgtaattgatcgattagaaaaagaattaaaaagtattatcggtaatggatttgcggtaatttacttaatttcgcaacgtttagttaaaaaatcattagatgatggatacttagttggttcccgtggttcagtaggttctagttttgtagcgacaatgactgagattactgaagtaaacccgttaccgccacactatatttgtccgaactgtaaaacgagtgaatttttcaatgatggttcagtaggatcaggattcgatttacctgataagacgtgtgaaacttgtggagccccacttattaaagaaggacaagatattccgtttgaaacatttttaggatttaaaggagataaagttcctgatatcgacttaaactttagtggtgaatatcaaccgaatgcccataactacacaaaagtattatttggtgaggataaagtattccgtgcaggtacaattggtactgttgctgaaaagactgcttttggttatgttaaaggctatttgaatgatcaaggcattcacaaaagaggcgctgaaatagatcgactcgttaaaggatgtacaggtgttaaacgtacaactggacagcatccagggggtattattgtagtgcctgattacatggatatttatgattttacgccgatacaatatcctgccgatgatcaaaattcagcatggatgacgacacattttgatttccattctattcatgataatgtattaaaacttgatatacttggacacgatgatccaacaatgattcgtatgcttcaagatttatcaggaattgatccaaaaacaatacctgtagatgataaacaagttatgcagatatttagtacacctgaaagtttgggtgttactgaagatgaaattttatgtaaaacaggtacatttggggtaccagaattcggtacaggattcgtacgtcaaatgttagaagatacaaagccaacaacattttctgaattagttcaaatctcaggattatctcatgggacagatgtgtggttaggtaatgctcaagaattaattaaaacaggtatatgtgatttatcaagtgtaattggttgtcgtgacgatatcatggtttatttaatgtatgctggtctagaaccatcaatggcttttaaaataatggagtcagtacgtaaaggtaaaggcttaactgaagaaatgattgaaacgatgaaagaaaatgaagtgccggattggtatttagattcatgtcttaaaattaagtacatgttccctaaagcccatgcagcagcatacgttttaatggcagtacgtatcgcatatttcaaagtacatcatccactttattactatgcatcttactttacaattcgtgcgtcagattttgatttaatcacgatgattaaagataaaacaagcatacgaaatactgtaaaagacatgtattctcgctatatggatctaggtaaaaaagaaaaagacgtattaactgtcttggaaattatgaatgaaatggcgcatcgaggttatcgaatgcaaccgattagtttagaaaagagccaagcgttcgaatttatcattgaaggcgatacacttattccgccgttcatatcagtgcctgggcttggcgaaaatgttgcgaaacgaattgttgaagctcgtgacgatggaccatttttatcaaaagaagatttaaacaaaaaagctggattatctcagaaaattattgagtatttagatgagttaggctcattaccgaatttaccagataaagctcaactttcgatattcgatatgtaaaatgaaataatcaaggtatttatttaattcgtatggcgtagttaaagaaatacaaaattgttgctggacacaaagttatacctgtatttcttttcaacgtcttacgagtctattcgaatgtaatgatgaaataaatgaacaaacttttacaagaatctctgattattagtgaagtcatttgtttcaagcataaacttatgctataattaagttgcttaaaaattagtgaactcaggcagaagagtgggagattcccgctcttttctatttgccaaaaagggaggcctgtatgagtaaaattacagaacaagtagaagtgattgttaaaccaattatggaagacttgaattttgaacttgtagacgttgaatatgtcaaagagggtagagatcattttcttagaatctctattgataaagaaggtggcgtagatttaaatgattgtacgctagcttctgaaaaaataagtgaagctatggatgcaaatgatcctattcctgaaatgtattatttagacgtagcgtcacctggtgcagaacgtccaattaaaaaagaacaagatttccaaaatgcaataactaaacctgtatttgtttctttatatgtaccaattgaaggtgaaaaggaatggttaggcattttacaagaagtcaataatgaaacaattgtagtacaagttaaaatcaaagcaagaacgaaagatatagagataccgagagacaaaatagcaaaagcacgtcacgcagttatgatttaacgtgatgaggaggaaaaaacgtgtcaagtaatgaattattattagctactgagtatttagaaaaagaaaagaagattcctagagcagtattaattgatgctattgaagcagctttaattactgcatacaaaaagaattatgatagtgcaagaaatgtccgtgtggaattaaatatggatcaaggtactttcaaagttatcgctcgtaaagatgttgttgaagaagtatttgacgacagagatgaagtggatttaagtacagcgcttgttaaaaaccctgcatatgaaattggtgatatatacgaagaagatgtaacacctaaagattttggtcgtgtaggtgctcaagcagcgaaacaagcagtaatgcaacgtcttcgtgatgctgaacgtgaaattttatttgaagaatttatagacaaagaagaagacatacttactggaattattgaccgtgttgaccatcgttatgtatatgtgaatttaggtcgtatcgaagctgttttatctgaagcagaaagaagtcctaacgaaaaatatattcctaacgaacgtattaaagtatatgttaacaaagtggaacaaacgacaaaaggtcctcaaatctatgtttctcgtagccatccaggtttattaaaacgtttatttgaacaagaagttccagaaatttacgatggtactgtaattgttaaatcagtagcacgtgaagctggcgatcgctctaaaattagtgtcttctctgaaaacaatgatatagatgctgttggtgcatgtgttggtgctaaaggcgcgcgtgtagaagctgttgttgaagagctaggtggcgaaaaaatcgacatcgttcaatggaatgaagatccaaaagtatttgtgaaaaatgctttaagcccttctcaagtgttagaagttattgttgatgaaacaaatcaatctacagtagttgttgttcctgattatcaattgtctttagcgattggtaaaagaggacaaaacgcacgtctagctgctaaattaaccggctggaaaattgatattaaatcagaaacagatgcgcgtgaagcgggtatctatccagtagttgaagctgaaaaagtaactgaagaagatgttgctttagaagatgttgacacaacagaatcaaccgaagaggtaactgatgtttcagttgaaacaaatgtagagaaagagtctgaataataagttggagtgaagtatctatgaaaaagaaaaaaattccgatgcgaaaatgtattctttcaaatgaaatgcatcccaaaaaagatatgattcgtgttgttgttaataaagaaggcgaaatctttgcggatgttactggaaagaaacaaggccgtggcgcatatgtttctaaagatgttgctatggttgaaaaagcacaacaaaaagaaattttagaaaaatattttaaagcatctaaagagcaattggatcctgtttacaaagaaattattagattaatttatagagaagagatcccaaaatgagtatagatcaaatattaaactttttaggattagcaatgagagctggtaaagtaaaaacaggtgaatcagtcattgttaatgagattaaaaaaggaaatttgaagctcgttattgttgcaaatgatgcgtctaataatacagctaaattaattacagataaatgtaagagttacaaagttccattcagaaagtttggaaatcgaaatgaattgggaatagcacttggaaaaggtgagcgtgttaatgtagggattactgacccaggctttgctaaaaagttgctatcaatgatagatgaatatcataaggagtgattatatgagtaaacaaagaatttacgaatatgcgaaagaattaaatctaaagagtaaagagattatagatgagttaaaaagcatgaatattgaggtttcaaatcatatgcaagctttggaagatgaccaaattaaagcattagataaaaagttcaaaaaagaacaaaagaacgacaataaacaaagcactcaaaataatcaccaaaaatcaaacaatcaaaaccaaaataaagggcaacaaaaagataacaaaaagaatcaacaacaaaataataaaggcaacaaaggcaataaaaagaataatagaaataataagaaaaataacaagaataataaaccacaaaatcaaccagctgctccaaaagaaataccatcaaaagtgacatatcaagaaggtattacagtaggcgaatttgcggataaattaaatgttgaatcatcagaaattatcaaaaaattattcttacttggtattgttgctaatatcaatcaatcattaaatcaagaaacaatcgaattaattgccgatgattatggcgttgaggttgaagaagaagttgtgattaatgaagaagatttatcaatctacttcgaagacgaaaaagatgatccagaagcaattgagagaccagcagttgtaacaattatgggacatgttgaccatggtaaaactactttattagattcaattcgtcatacaaaagttacagcaggtgaagcaggcggaatcactcaacatattggtgcatatcaaattgaaaacgatggcaaaaaaatcactttcttagatacacctggacatgctgcatttacaacgatgcgtgcgcgtggtgcacaagtaacagatattacaattttagtagtagcagctgacgatggtgttatgccacaaacaattgaagcaattaaccatgctaaagaagcagaagtaccaattattgttgcagtaaataaaattgataaaccaacttcaaatcctgatcgagttatgcaagaattaactgaatatggtttaattcctgaagattggggcggcgaaacaattttcgttccactttctgcattaagtggtgatggtatcgacgatttattagaaatgataggattagttgcagaagttcaagaacttaaagcaaatcctaaaaaccgtgctgttggtacagttatagaagctgaattagataaatcacgtggtccttctgcatcattattagtacaaaacggtacattaaatgttggtgatgcgattgtagtgggtaatacttacggccgtatccgtgcaatggttaatgacttaggtcaaagaatcaaaacggctggtccatcaacgcctgttgaaattacaggtattaatgatgtgccacaagctggggatcgctttgttgtatttagtgatgaaaaacaagctcgtcgtattggtgaatcaagacacgaagctagcattgtacaacaacgtcaagaaagtaaaaatgtttcattagataacctgtttgaacaaatgaaacaaggtgaaatgaaagatttaaacgttattattaaaggtgatgttcaaggttctgttgaagctttagctgcatcattaatgaaaattgatgttgaaggcgtaaatgttcgtatcattcatacagcggttggtgcgattaacgagtcagacgtgacacttgctaatgcctcaaatggtattatcattggtttcaatgttcgtccagacagtggtgcaaaacgtgctgcagaagctgaaaatgttgatatgcgtttacacagagttatttataatgttatcgaagaaattgaatcagcgatgaaaggcttacttgatccagaatttgaagaacaagttatcgggcaagctgaagttcgtcaaacattcaaagtttctaaagttggtactattgctggatgttatgttactgaaggtaaaattacgcgaaatgctggtgtacgtattattcgtgatggtattgttcaatatgaaggcgaattagatacacttaaacgtttcaaagatgatgctaaggaagttgcaaaaggttatgaatgtggtattacaattgaaaactacaatgaccttaaagaaggcgatgttatcgaagcatttgaaatggttgaaattaagcgttaattaaataaattacaagctataagtatagttaaggttgatatgctccctataaatatttcactttttaagtgtctactttatagggagcatatttgatactagcttttggttttttattagaatagattacctattaaaagttacgttatatagacatgtttttgtataaaattttgtggtggcctagaatgatttttaatgacaaaatatcatgtcgactattattggaaaattttctgttgaaatgcctatcttacggcaaactttatttgattttataggcttaatttattaaaataacgtgtgagctaaaataattgtttaagcattgttacactaaaaaatgcaaataacaattgaacttaaagataaagaggtgacaagaatgagcagtatgagagcagagcgtgttggtgaacaaatgaagaaggaattaatggatatcatcaacaataaagtcaaagatcctcgagttggttttattacaattacagatgttgttttaacaaatgatttatcgcaggctaaagtatttttaactgtattaggtaacgataaagaagtagaaaatacatttaaagcacttgataaagcaaaaggcttcattaagtctgaattaggttctagaatgcgattacgtattatgccggaattaatgtatgaatatgatcaatcaatcgaatatggtaataaaattgaacgaatgattcaagatttacacaaacaagatagataatttagtgttaggtatctggaaaatgtttgataatttcttaatatcggtatattaacattaaacagttaatacatagatgtgtagaaatagttaacattttccagtttttttatgaataaattcagttaatacgctattaaaatatattttcaaaaaagaaggtgacaacatgtataacggtatattaccagtatataaagaacgtggtttaacaagtcatgacgtcgtattcaaattgcgtaaaattttaaagactaaaaaaatagggcacactggtacgcttgatcctgaagttgcaggcgtgttaccggtatgtataggtaatgcaacgagagttagtgattatgttatggatatgggcaaagcttatgaggcaacggtatcgataggcagaagtacaacaactgaagatcaaatgggtgatacattggaaatgaagggtgtacattcagctgatttcaacaatgacgatattgaccgattgttagaaagttttaaaggtatcattgaacaaattccgccaatgtattcatcagtcaaggtgaatggtaaaaaattatatgaatatgcgcgtaataatgaaacagttgaaagaccaaagcgtaaagttaatattaaagacattgggcgtatatctgaattagattttaaagaaaatgagtgtcattttaaaatacgcgtcatctgtggtaaaggtacatatattagaacactagcaactgatattggtgtgaaattaggctttccggcacatatgtcgaaattaacgcgaatcgagtctggtggatttgtgttgaaagatagccttacattagaacaaataaaagaacttcatgagcaggattcattgcaaaataaattgtttcctttagaatatggattaaagggtttgccaagcattaaaattaaagattcgcacataaaaaaacgtattttaaatgggcagaaatttaataaaaatgaatttgataataaaattaaagaccaaattgtatttattgatgatgattcagaaaaagtattagcaatttatatggtacaccctacaaaagaatcagaaattaaacctaaaaaagtctttaattaaaggagatagaatttatgaaagtcatagaagtgacacatcctatacaatctaaacagtatattacagaggatgttgcaatggcattcggatttttcgatggcatgcataaaggtcatgacaaagtctttgatatattaaacgaaatagctgaggcacgcagtttaaaaaaagcggtgatgacatttgatccgcatccgtctgtcgtgttgaatcctaaaagaaaacgaacaacgtatttaacaccactttcagataaaatcgaaaaaattagccaacatgatattgattattgtatagtggttaatttttcatctaggtttgctaatgtgagcgttgaagattttgttgaaaattatataattaaaaataatgtaaaagaagtcattgctggttttgattttacttttggtaaatttggaaaaggtaatatgactgttcttcaagaatatgatgcgtttaatacgacaattgtgagtaaacaagaaattgaaaatgaaaaaatttctacaacttctattcgtcaagatttaatcaatggtgagttgcaaaaagcgaatgatgctttaggctatatatattctattaaaggcactgtagtgcaaggtgaaaaaaggggaagaactattggcttcccaacagctaacattcaacctagtgatgattatttgttacctcgtaaaggtgtttatgccgttagtattgaaatcggcactgaaaataaattatatcgaggggtagctaacataggtgtaaagccaacatttcatgatcctaacaaagcagaagttgtcatcgaagtgaatatctttgactttgaggataatatttatggtgaacgagtgaccgtgaattggcatcatttcttacgtcctgagattaaatttgatggtatcgacccattagttaaacaaatgaacgatgataaatcgcgtgctaaatatttattagcagttgattttggtgatgaagtagcttataatatttagagttgcgtatagttatataaacaatctataccacacctttttcttagtaggtcgaatctccaacgcctaactcggattaaggagtattcaaacattttaaggaggaaattgattatggcgatttcacaagaacgtaaaaacgaaatcattaaagaataccgtgtacacgaaactgatactggttcaccagaagtacaaatcgctgtacttactgcagaaatcaacgcagtaaacgaacacttacgtacacacaaaaaagaccaccattcacgtcgtggattattaaaaatggtaggtcgtcgtagacatttattaaactacttacgtagtaaagatattcaacgttaccgtgaattaattaaatcacttggtatccgtcgttaatcttaatataaagtctttgaggttggggcatatttatgttccaaccttaatttatattaaaaaagctttttacaaatattaacatttattatatgttaagctaatattgagtgaataataaggttacaataagataaagatgatataagtacacctagagtaataatcaagatattaaaaataaagtatgtttttaaaaaaaatataacttatatttatactgataagggtgggacgataagtctattttgtaaataatagatggatatcccgctctctttttttccaattcaatattttataactaatattaaaatacgataataaatgatatgatataactattagattcaagagaggagatttataatgtctcaagaaaagaaagtttttaaaactgaatgggcaggaagatctttaacgattgaaacagggcaattagctaaacaagcaaatggcgctgtattggttcgttatggagatacagtcgtgttatcgacggcaacggcatcaaaagaacctcgtgatggagatttcttcccattaacagtgaactatgaagaaaaaatgtacgctgcgggtaaaattcctggtggatttaaaaagagagaaggacgtcctggtgacgatgcaacattaactgcgcgattaattgatagaccaattagacctttattccctaaaggatataagcatgatgttcaaattatgaacatggtattaagtgcagatcctgattgttcaccacaaatggctgcaatgattggttcatctatggcgcttagtgtgtcggatattccattccaagggccaatcgccggtgtaaatgtgggttatattgacggtaaatatatcattaacccaacagtagaagaaaaagaagtttctcgcttagaccttgaagtagctggtcataaagatgcagtaaacatggtagaggcaggcgctagtgagattactgaacaagaaatgttagaggcgattttctttggtcatgaagagattcaacgtttagttgatttccaacaacaaatcgtcgaccacattcaacctgttaaacaagaatttattccagcagagcgtgatgaagcgctagttgaacgtgtaaaatctttaactgaagaaaaaggacttaaagaaacagttttaacatttgataaacaacaacgagatgaaaatcttgataacttaaaagaagaaatcgtcaatgaatttatcgatgaagaagatccagagaatgaattacttattaaagaagtttatgcaattttaaatgaattagtgaaagaagaagttagacgtttaattgcagatgaaaaaattagaccagacggccgtaaacctgatgaaatccgtccattagattctgaagttggtattttacctagaacgcatggttcaggtctatttacacgtggtcagactcaagcactttcagttttaacattaggtgctttaggcgattatcaattaattgatggtttaggacctgaagaagaaaaaagatttatgcatcattataacttcccgaatttttcagtaggtgaaactggtccagtacgtgcgccaggtcgtcgtgaaattggacatggtgcgttaggtgaaagagcattaaaatatattattccagatactgctgatttcccatatacaattcgtattgtaagtgaggtacttgaatcaaatggttcatcatctcaagcgtcaatttgtggatcaacattagctttaatggatgcgggcgtaccgattaaagcaccagttgctggtattgctatgggtcttgttacacgtgaagatagctatacgattttaactgatatccaaggtatggaagatgcattaggtgatatggactttaaagtcgctggtactaaagaaggtattacagcaatccaaatggatattaaaattgacggtttaacgcgtgagattatcgaagaggctctagaacaagcgagacgtggtcgtttagaaataatgaatcatatgttacaaacaattgatcaaccacgtactgaattaagtgcttacgcgccaaaagttgtaactatgacaattaaaccagataagattagagatgttatcggacctggtggtaaaaaaattaacgaaattattgatgaaacaggcgttaaattagatattgaacaagatggtactatctttattggtgccgttgatcaagctatgataaatcgtgctcgtgaaatcattgaggaaattacacgtgaagcggaagtaggtcaaacttatcaagccactgttaaacgtattgaaaaatacggtgcgtttgtaggcctattcccgggtaaagatgcgttgcttcacatttcacaaatttcaaaaaatagaattgaaaaagtggaagatgttttaaaaatcggtgacacaattgaagttaagattactgaaattgataaacaaggtcgagtaaatgcatcacacagagcattagaagaataatatttaaagtcatatgacgacaatgtatcgtcatgtgatttttttatgccattttttacgaagtgacccattttgaatttgttgtattgaacattttaaaacgctttattattttgtgtgcaactgttaattatcctgtatgtatagtgattaatagtgtacatcaagtgttttttaacttataatgaatagtgagtttatatatggacgggtaacaaatttaggaggtaagattttgagtttaataaagaaaaagaataaagatattcgcattataccattaggcggtgttggcgaaattgctaaaaatatgtatatcgttgaagtagacgatgaaatgtttatgttagatgctggacttatgtttccagaagacgaaatgctaggtattgatattgttataccagacatttcatacgtacttgaaaataaagataaattgaagggtatattccttacacacggacatgagcacgcgattggtgcagtgagttatgttttagaacaattagatgcaccagtatatggatctaaattgacaatagcgttaattaaagaaaatatgaaagcccgtaatattgataaaaaagttcgctactatacagttaataatgattcaattatgagattcaaaaacgtgaatattagtttctttaatacgacacacagtattcctgatagtttaggtgtttgtattcacacttcatatggtgccattgtgtatacaggtgaatttaagtttgaccaaagtttacatggacattatgcaccagatattaaacgtatggcagagattggtgaagaaggcgtatttgtcttaatcagtgattctactgaggcagagaaacctggatataatactccggaaaatgtaattgaacatcatatgtatgatgcttttgcaaaagtgcgaggtcgcttgattgtttcatgttatgcttcgaactttatacgtattcagcaagttttaaatattgctagcaagctaaatcgtaaagtgtcatttttaggaagatcacttgaaagttcatttaatattgctcgtaaaatggggtatttcgacattcctaaagatttgctaattcctataacagaagttgataattatcctaaaaatgaagtgataattatagctactggtatgcaaggagaacctgtagaagccttaagtcaaatggcgcaacataagcataaaattatgaatatcgaagaaggcgattctgtatttttagcaattacggcttctgctaatatggaagttatcattgcgaatacattaaatgagcttgtacgtgctggcgcacatattattccaaataacaagaagattcatgcttcaagtcatggttgcatggaagaattaaaaatgatgattaatattatgaaacctgaatactttattcctgtacaaggtgaatttaaaatgcagatagcacatgcgaagctagcagctgaagcaggtgttgcaccagaaaagattttccttgtggaaaaaggagatgtcattaattacaacggtaaagatatgatattaaatgaaaaggtaaattcaggaaatattttaatagatggtattggtattggggatgtaggaaatatcgtgttgagagaccgtcatcttttagcagaagatggtatctttattgctgtagtaacgttagatcctaaaaatagacgtatagctgcgggacctgaaattcaatctcgtgggtttgtatatgtacgtgaaagtgaagacttattacgtgaagcagaagagaaagtacgtgaaatagtagaagctggtttacaagaaaaacgcatagaatggtctgaaattaaacaaaatatgcgtgatcaaattagtaaactattattcgaaagtacaaaacgtcgtcctatgattattccagtaatttctgaaatttaatcaaaaagtcattaacataaaagaggtcagaacaagtcaccgaaatataatggttgtcatggacaatttacttatattttatgatggtcaattgaaggggtaacgattaatctgttatcttaagtaaattgatacatagatgatattgttctaacctctttcatcgtctgtttggactacatattctaaacatcaaataggaaattatatataataacgtcgttttaactaaggcaacataaggaggtgcgtcaattggcacaagcaaaaaagaaatcgacagctaagaaaaaaacaacatcaaaaaaaagaacaaattcgaggaaaaagaagaatgataatccgatacgttatgtcatagctattttagtagttgtattaatggtgttgggtgttttccaattaggaataataggtcgtctaattgacagcttctttaattatttatttgggtacagtagatatttaacatatattttagtactcttagcaactggttttattacatactctaaacgtattcctaaaactagacgaacggctggttcgattgtattgcaaattgcattgctatttgtatcacagttagtttttcattttaatagtggtatcaaagctgaaagagaacctgtactttcttatgtgtatcagtcataccaacacagtcattttcccaattttggtggcggtgtattaggcttttatttattagagttaagcgtacctttaatttcattatttggtgtatgtattattactattttattattatgctcaagtgttattttattaacaaaccatcaacatcgtgatgttgcaaaagttgcactggaaaatataaaagcttggtttggttcatttaatgaaaaaatgtcggaaagaaatcaagaaaaacaattgaagcgtgaagaaaaagcgagacttaaagaagaacaaaaggcacgtcaaaatgaacagccacaaataaaagatgtgagtgattttacggaagtgcctcaagaaagagatattccaatttatgggcatactgaaaatgaaagtaaaagccagagtcaaccaagtcgaaaaaaacgagtgtttgatgcagagaatagttcgaataacatcgtaaatcatcatcaagcagatcagcaagaacaattaatagaacaaactcataacagtgttgaaagtgaaaacactattgaagaagctggtgaagttacgaatgtgtcgtatgttgttccaccgttaactttacttaatcaacctgcaaaacaaaaagcaacatctaaagctgaagtgcaacgtaaaggacaagtactagagaatacattaaaagattttggggtaaatgcaaaagtgacacaaattaaaattggtcctgcagtaactcaatatgaaattcaaccagctcaaggggttaaagtgagtaaaattgtaaacttgcataatgatattgcattagctttagcagcaaaagatgttagaattgaagcgccaatacctggtcgctctgcagtaggtattgaagtgccaaatgagaaaatttcattagtttcactaaaagaagttttagatgaaaaattcccgtctaataataaactagaagttggattaggacgagatatatcaggtgatccaattactgttccactaaatgaaatgccacacttattggtggcaggatcgacgggtagtggtaaatctgtttgtataaatggtattattacaagtattttattaaatgctaagccgcatgaagttaaacttatgttaatcgatccgaaaatggttgaactaaatgtttataacgggattccacatttattaattccggttgttacaaatcctcataaagctgctcaagctttagaaaaaattgtagctgagatggaaagacgttatgatttattccaacattcatcaactagaaacattaaaggttataacgaattaatccgtaagcaaaatcaagaattagatgagaagcaaccagaattaccctatatcgttgttattgtagatgagcttgcagatttaatgatggtagctggtaaagaagttgaaaatgcgattcaacgtattacacaaatggcacgtgcagcaggtatacatttgattgtagcaacacaaagaccttctgtggatgtaattacaggtatcattaaaaataatattccatctagaattgcttttgctgtgagttctcaaacagattcaagaactattattggtactggcggcgcagaaaagttacttggtaaaggtgacatgttatacgttggaaatggtgattcatcacaaacacgtattcaaggggcgtttttaagtgaccaagaggtgcaagatgttgtaaattatgtagtagaacaacaacaggcaaattatgtaaaagaaatggaaccagatgcaccagtggataaatcggaaatgaaaagtgaagatgctttatatgatgaagcgtatttgtttgttgttgaacaacaaaaggcaagtacatcattgttacaacgccaatttagaattggttataatagagcatctaggttgatggatgatttagaacgcaatcaggtaatcggtccacaaaaaggaagcaagcctagacaagttttaatagatcttaataatgacgaggtgtaaaaaaatgtcagaaatgaatgcggtatataacgttaaacaatacattttaaatttgattaagcaaaataaattggaatatggtgaccaacttccaagtaatttatcaattgccagagaattaaatgtaaaaaccgacgatgtttatgaagcaattcaggcattgattactgaacaagtcattaaagataattttgaagagggcacaagtgttaagtcactgccccctttcttttatccattgaatgaacttataagtattgggcaaatgattaaaaatgcaggatttgaatgcggaactgaatacttaaattttgatgagcaaccagcaactatgttagatgcaaatttgttgagcgttgaagaaggatattcagtaaccattatagaacgattacgaactgccgatggagaaccggtcgtctattgtttagataaaattgctaaaaaagaattaacatgtacagagtatcaaatgagcaatggatcgatactaagtgcgataaaagaacaaagtaatcataatatttgttacgctgatacagaaattgaagcggtaaattatgaacctcgaatatccgaagtacttaatgcttcgccacacgaaggtttgattttattaaaaattacgcactacaatgaattagatgaacctattttgtattcattaaattatatgaaaaatagcttagttcaatttaaaatcactagaaaaatatagatgtaagaagatatagaggaggctatatatttgagtagacaatctcaaccaaatatacatatcaaagtttcaccaacaactaaatttaaaacaactactatagtttttaaatttatggcacctttagaatatgacacaataacaggtagatcattattaagcaaattattagttcgagcaactaagaaatggccaaccgataagtcatttaataatcacttagccgatttatatggtgcgtatgtgaatagtacaatttcaaaattcaaagatcagcatgtcattacattttcattagaaattgttaatgaacgttatttaagaaacggtgaatcattatttaatcaaggattagatttattacaagaaatcatttggaatccattaattgaaaataaagcattcaatgataattttgttaaccaagagaaaacattattagccaaaaaaatagaagctatggtagataacaaagcgcaatattcgtttttaaaattactcgaccatatgtttgaaaatgaagcatacaaatacttatctacaggacaactagaacaaatcccacatattactgctgaaacactatatcatacatatcaatcaatgattaataatgatcaatgttctgtttatgttgtcggcaatgtagaacctgaaagtgttgagaaacaaatacgtgaaaaatttgcacttaaaccattcgataaacatcaattccaacattctactcatcatttacacgatgaagaagttgattatattgttgaatatgatgacgtggatcaagctaaattaaatatgggataccgttttccaacacaatatggtcaaagtggatatgctgcctttgttgtatttaacatgatgtttggaggagatccttcatctgttttatttaatgaagtgcgagaaaagcaaagtttagcgtactctatacattcacaaattgatggcaaaaatggctatttatttgttttgagtggggtttcaagcgataagtacgaaactgcaaaaaacactattataagtgaatttgaaaaaataaaagcaggagatttcactgaagaaaaattagagttagctaaaaaagtaatcatttctcatcgatatgaatctgaagatcgtccgaaaagtgttatagagattatgcataaccaaatattattagagcaaccacaaagcaaagaaacatttataaaagatatacagaaggtaagtcgcgaagatattgtttctgttgctgaaaaagcatttttagatacaatctatgtgttgacaaaaggaggggataaataatgaaagagcgttattatgaattaatagacgaaagagtattcgaacaagaattagaaaatggtttacgattatttattatccccaaaccaggttttcaaaagacatttgtcacttacactacacaatttggttcattagataatcaattcaaacccattggacaagaccaatttgttactgtacctgatggagttgctcactttttagaacataaattatttgaaaaagaagaagaagacttatttactgcgtttgctgaagataatgcacaagcaaatgcgtttacaagctttgatcgtacaagctacttgttcagtgcaactgataatattgaaaacaacattaaacgtttacttacaatggttgaaacgccttattttacaaaagaaactgttgataaagaaaaaggtattattgcagaagaaataaaaatgtatcaagaacaacctagatataaattaatgttcaatacattgcgtgcaatgtatcaacaacatccaatacgtgttgatattgccggtagtgtagaaagcatatacgatattacaaaagatgatttgtatctatgttatgaaacgttttatcatccatcaaatatggttttatttgttgttggtgatgtggatcctgaaacaatatgtcgaatagtaaaacaacacgaggatgctcgtaataaagttaaccaacccaaaatcgatcgaggacttgttgatgaaccggaggatgttaaagaagcatttgttactgaatctatgaaaattcaatcaccaagactaatgcttggttttaaaaataaacctttacaagaagcgcctcaaaaatatgtacaacgtgatttagaaatgtcattattctttgagttgatttttggggaagaaacagatttttatcagaatttattaaacgaaggacttatcgatgatacatttggttatcaatttgtactagagccgacgtatagtttttcaatcgtgacaagcgctactgaagaaccagataaattaaaaaaattattattagatgagttgtgtgataaaaaaggcaatttccaagatgcagaagcatttgaacttttgaaaaagcaatttataggtgaattcatatcaagtttaaactcacctgaatatattgctaatcaatatactaaattgtattttgaaggtgttagtgtgtttgacatgttagacattgttgaaaacatcacgttagatagtattaatgaaacgtcatcgttatatttaaatttagatcagcaagtcgatagtcgtttggagattaaaaagtaatgaaagcattagtattaggtggttctggttcaattggttctgagatagtcaaacaattattaactgatggatttgaagtttatgtgcaatattatcgtactgatataaatgaattaactagcaaatttaatgatgacaaagtgcattttatacaagcggatttatctcaaacaattgatattgacaaaacatttggtgacattaaatcattagactgtttaatatatgcaagtggtcagtctttatatggtgttttacaagatatgaaagaccatgatattgatgcatgttatcagttaaatgtcttgcaattaattcgattatgtagatatttcgttgatgttttacgtcaaagtgacaatggaagaattattgtaatttcatcaatttggggtgagacaggagctagtatggaaactatttattcgacgatgaaaagtgcacaattaggtttcgttaaggcgcttagtcaagagcttgcactaacatcagtgacagtaaatgctatcgcacctggatttgtagccggtaatatggcaagtgagtggcaagaagatgaacttcaagcaatgataactgaattaccacaacagcgattggttttaccgagtgaggttgctcatacatgcgcctatttatatcacccaaatgctagaagtgttactggaactatacagaaagttaatggtgcttggtatatttaaaatatagaactatttttatgagcaaatgtttttatgattgatgttataatatgaatattacaatgaatcataatttgttaattaaacaaggggtgaggttcaccatgacagttgcagagaaaaaagaatggtacttagaatacgaaattgaaattaatagaccgggtcttttaggtgatgtatctagtttattaggtatgttaggtataagtattgttacaattaatggtgttgatcaaggtaaacgaggccttttaattaaaacagacaatcttgaaaaagttgaacgttttgagcaaatagctcgtggtataaatgaaattgaaataacaaagcttaaaaaaccagaattaagagaccgtcttgcagttagacatggtagatatattgagcaagatgcaaaagataagaaaacctttcgatttgagcgtgaagatttaggcttgttagtagactttttagctgaattgttcaaagaagaaggtcataagttgattggcattagaggtatgccacgggttggtaaaactgaatcaattgttgcgggaagtgtttgtgcacataagagatggttatttattagttctactttaataaaacaaactgtacgtagctctcttattaaaggggaatatgatgccaatcatgtatacattattgatggtgcagttactgccagagaatctaatccaaaacatcaagagcttgttaacgaagttatgacgttaccttcaatcaaagtcgttgaacacccagatttatttgttgaaacaagtacttgtacaatggaagattttgactatattatcgaattgagagaaaatgaaaatcaagaaatacattacgaagaaatgaagaaacagacagtccaaagtaagaacaatttagattttggagatccatttggtggtggttttggtttcttcgagtaagtgtaaggaggctatgaattgaaaacggtcggtgaagcgctaaaaggtagacgtgaaaggttaggaatgactttaacagaattagagcaacgtactggaattaaacgtgaaatgctagtgcatattgaaaataatgaattcgatcaactaccgaataaaaattacagcgaaggatttattagaaaatatgcaagcgtagtaaatattgaacctaaccagttaattcaagctcatcaagatgaaattccatcgaaccaagccgaatgggacgaagtaattacagttttcaataataataaagacttagattataagagtaaatcaaaagagccaatacaattattagtaatcatgggtattacagttttaataactttattgttatggatcatgttagttttaatattttaacagaaataaattagtgagaaatgaggatgtataatgaatattccgaaccagattacggtttttagagtagtgttaataccagtttttatattgtttgcgttagttgattttggatttggcaatgtgtcatttctaggaggatatgaaataagaattgagttattaatcagtggttttatttttatattggcttcccttagcgattttgttgatggttatttagctagaaaatggaatttagttacaaatatggggaaatttttggatccattagcggataaattattagttgcaagtgctttaattgtacttgtgcaactaggactaacaaattctgtagtagcaatcattattattgccagagaatttgccgtaactggtttacgtttactacaaattgaacaaggattcgtaagtgcagctggtcaattaggtaaaattaaaacagcagttactatggtagcaattacttggttgttattaggtgatccattggcaacattgattggtttgtcattaggacaaattttattatacattggcgttatttttactatcttatctggtattgaatacttttataaaggtagagatgtttttaaacaaaaataaatatttgtttatactagatttcattttcatatggaatctagtttttttaatcccaattttagaaattagccacgcatttgtttataatgatatattgtaaaacaatatttgttcattttttagggaaatgtgttgtagcatctgatacattgaatttaaaattgatgtgaatttttaaatggaatacatgaaaaaatgaattaaacgatacaagggggatataaatgtcaattgccattattgctgtaggctcagaactattgctaggtcaaatcgctaataccaatggacaatttctatctaaagtatttaatgaaattggacaaaatgtattagaacataaagttattggagataataaaaaacgtttagaatcaagtgtacgtcatgcgttagaaaaatatgatactgttattttaacaggtggcttaggtcctacgaaagatgacttaacgaagcatacagtggcccagattgttggtaaagatttagttattgatgagccttctttaaaatatattgaaagctattttgaggaacaaggacaagaaatgacacctaataataaacaacaggctttagtaattgaaggttcaactgtattagcaaatcatcatggcatggctccaggaatgatggtgaattttgaaaacaaacaaattattttattaccaggtccaccgaaagaaatgcaaccaatggtaaaaaatgaattgttgtcacattttataaaccataatcgaattatacactctgaactattaagatttgctggaataggtgaatctaaagtagaaacagtattaatagatcttatcgataaacagactaatcctacgattgcgcctttggcaggaagtcatgaagtatatattagattgactgcaaatgccgactcaaaagaacaagcacaatcattgattcaacctgttaagcaagaaattcttgatcgtattggagaatattattatggttcagatgacacattaattgagcaagctgtaataaagaaaattaatgaaccttttgtaatatatgatggtattactaatggtgctttatatcatcgattgaaagaagtggatttaaacgatgttctaaagggtatgattaatcacaatgaaaactttgttgatattaataaacctattgagcagcaattaaaagatgcagtgcaatttgttaataaattatttaatgtgtcatcagcaattattctattagagtatgatggtgtagtccatataggctatgataataacttagaatttaaaactgagcaatttaaaatgtctaaatctagaaatttattaaagaacagaagtcaaaattatgcgcttataaggttattaaattggcttagaacaacaaattaattgtattatcgataaagatataagcacgtttgttcgtttttgtgttttgatttcaagattttacacgaacaaatattcgcaaaacacttgtattttattttgaatccttgtatagtattggtaagataattaaaagatagcaatttcaattaggaggtctcgctttggataacgatcgtcaaaaagctttagatacagtaattaaaaatatggagaaatctttcggtaaaggtgccgtaatgaagttgggtgacaatataggtcgccgagtttcaactacatcaactggttcagttacattagataatgcgctaggtgtaggtggctatcctaaaggacgaattattgaaatttatggtcctgaaagttctggtaagacaacagtagcgcttcacgctattgctgaagttcaaagtaatggcggggtggcagcatttatcgatgctgaacatgctttagacccagaatatgctcaagcattaggcgtagatatcgataatttatatttatcgcaaccggatcatggtgaacaaggtcttgaaatcgccgaagcatttgttagaagtggtgcagttgatattgtagttgtagactcagttgctgctttaacacctaaagctgaaattgaaggagaaatgggagacactcacgttggtttacaagctcgtttaatgtcacaagcgttacgtaaactttcaggtgctatttctaaatcaaatacaactgctattttcatcaaccaaattcgtgaaaaagttggtgttatgttcggtaatccagagactacaccaggtggacgtgctttaaaattctatagttcagtaagactagaagtacgtcgtgcagaacagcttaaacaaggacaagaaattgtaggtaatagaactaaaattaaagtcgttaaaaataaagtggcaccaccatttagagtagctgaagttgatattatgtatggacaaggtatttctaaagagggtgaacttattgatttaggtgttgaaaacgacatcgttgataaatcaggagcatggtattcttacaatggcgaacgaatgggtcaaggtaaggaaaatgttaaaatgtacttgaaagaaaacccacaaattaaagaagaaattgatcgtaaattgagagaaaaattaggcatatctgatggtgatgttgaagaaacagaagatgcaccaaagtcattatttgacgaagaatagtacacaaatttatatctatagttaaacttagcaaatatccttataggattgattgaaagtgatattcatctcataaagctggaataatatctaactttatgggatgcacttcaaatcgagactataaggttttttatgttatttactattacattatcaatagttttataatcgagcttcaaaactttagaaaatagtagaaatagcattcaataaagtgcaaaagtgcaaattgataacttgacacttatctcctataaaccgtacaattaatttgtatgatttatatataatttcataaagtcatattgaatttcatataaagagcaaaccctagaaaaggaggtgtttgtgtgaatttattaagcctcctactcattttgctggggatcattctaggagttgttggagggtatgttgttgcccgaaatttgttgcttcaaaagcaatcacaagctagacaaactgccgaagatattgtaaatcaagcacataaagaagccgacaatatcaaaaaagagaaattacttgaggcaaaagaagaaaaccaaatcctaagagaacaaactgaagcagaactacgagaaagacgtagcgaacttcaaagacaagaaacccgacttcttcaaaaagaagaaaacttagagcgtaaatctgatctattagataaaaaagatgagattttagagcaaaaagaatcaaaaattgaagaaaaacaacaacaagtagatgcaaaagagagtagtgttcaaacgttaataatgaagcatgaacaagaattagaacgcatctccggtctcactcaagaagaagctattaatgagcaacttcaaagagtagaggaagaactgtcacaagatattgcagtacttgttaaagaaaaagaaaaagaagctaaagaaaaagttgataaaacagcaaaagaattattagctacagcagtacaaagattagcagcagatcacacaagtgaatcaacggtatcagtagttaacttacctaatgatgagatgaaaggtcgaatcattggacgagaaggacgaaacatccgtacacttgaaactttaactggcattgatttaattattgatgacacaccagaagcagttatattatctggttttgatccaataagaagagaaattgctagaacagcacttgttaacttagtatctgatggacgtattcatccaggtagaattgaagatatggtcgaaaaagctagaaaagaagtagacgatattataagagaagcaggtgaacaagctacatttgaagtgaacgcacataatatgcatcctgacttagtaaaaattgtagggcgtttaaactatcgtacaagttacggtcaaaatgtacttaaacattcaattgaagttgctcatcttgctagtatgttagctgctgagctaggcgaagatgagacattagcgaaacgagctggacttttacatgatgttggtaaagcaattgatcatgaagtagaaggtagtcatgttgaaatcggtgtagaattagcgaaaaaatatggtgaaaatgaaacagttattaatgcaatccattctcaccatggtgatgttgaacctacatctattatatctatccttgttgctgctgcagatgcattgtctgcggctcgtccaggtgcaagaaaagaaacattagagaattatattcgtcgattagaacgtttagaaacgttatcagaaagttatgatggtgtagaaaaagcatttgcgattcaggcaggtagagaaatccgagtgattgtatctcctgaagaaattgatgatttaaaatcttatcgattggctagagatattaaaaatcagattgaagatgaattacaatatcctggtcatatcaaggtgacagttgttcgagagactagagcagtagaatatgcgaaataatttttgtctccctcacaaattagtgagggagcttttttaagttgtagtctcaatctagttagacagcactttattggtaataactatattaaacagtagttatttgaaagtaagacgtaccttatattaaataagaagttattgcttttaataaaaatgttttaggttcataattactatatttatattatgtaaacctataaaggtgattgctttttctaactaacaaaaaagaagagaagatgtaacacatcttctcttctgcaatattaattagtatttatttctaaggtgagttattttaattgtaaatctgttttctttaattcttttataacttctgcagtatcataacaatttgttgcaattgttgaatatctctctgctaaacgatatgcattaatgtaaagctttaaactttctttagctatatcctctgcatcttcgaattttgatgggttagacataactactaattctgcaaatttttctggatcaatattaatagacatgtatttatttacaactcctatttattttgatgtcttaatactaacatattgaagttttcagacaaagtaatgtctctctataattgaagaaaaataattcaaagaatttaatatttactttaaatattagaacgtatgaattaaactagtatttatgagaggatgaacaaaacatgagaataatgtttataggggatatcgtaggtaaaattggacgagacgcaattgaaacgtacatacctcaactgaagcaaaagtataaaccaacagttacaattgtaaatgctgaaaatgcagcacatggtaaaggtttgactgaaaaaatatataaacaattactaagaaatggtgtagatttcatgactatgggtaatcacacatatggtcaacgtgaaatttatgattttatagatgaagctaaacgactagtaagaccagcgaattttccggatgaagcgccgggaattggtatgagatttatacaaattaatgatattaaacttgcagttattaatctgcaaggaagagcgtttatgccagatattgatgatccttttaaaaaggcagatcaattagtcaaggaagcacaagaacaaactccgtttatatttgttgattttcatgcagaaacaacttctgaaaagtatgcaatgggatggcatttagatggtagagctagcgctgttgttggaacgcatacacacattcaaacagcagatgaacgtattttaccaaagggtacagggtatataacggatgttggtatgacaggcttttatgacggcattttaggaataaataaaacagaggtaattgagcgttttatcactagtttgccacaaagacatgttgttccaaatgaaggtagaagtgtattatctggtgttgttattgatttggacaaagaaggtaaaacaaagcacatcgaacgtatattgataaatgatgaccatccattttcaacattttaaaattacgtaagtaaacattctaattggaccctatcgtccattagtatgaatttaatatagtaccactgtttacatagtaaatcggtggttctttttgttatcatttaatatgaaatatatccataggaggcatataactatgaaaccacaattatcgtggaaagttggcggtcaacaaggcgaaggtattgaatcaactggggaaatcttcgctacggctatgaatagaaaaggatattatttatatggatatagacatttttcaagtcgtatcaaaggtggacatacgaataataaaattagagtttctacgacgcctgttcatgcaattagtgatgatttagatattttgattgcatttgaccaagaaacaattgatgttaaccatcatgaaatgagagaagacagtatcattttagctgatgccaaggctaaacctgtgaaaccagaaggatgtcatgcacagcttattgaattaccttttacagcaaccgctaaagaattaggtacagcattaatgaaaaacatggttgcaataggtgctactagcgcattgatgaatttgaatacaaatacatttgaagaacttattactaatatgttttctaaaaaaggtgacaaggtagttgaagtcaatatccaagcattaaacgaaggttatcaattaatgcaatctcgcttacctgaaatcgacggggactttgaattagagtcaacagatgcactaccacatctatatatgattggtaacgatgccattggattaggtgcaattgctgcaggttcacaatttatggcggcatatcctattacacctgcgtctgaagttatggaatatatgattgccaatatatctaaagtaaacggagcggttattcaaacagaagatgaaattgctgctgtaactatggctattggtgcaaattatggtggagtcagagcgtttacggctagtgctggtccaggtttatctttgatgatggaagcaattggattatctggtatgactgaaacgccattagtcattattaatacccaacgaggtggaccttctactggattacctacgaaacaagaacagtcagatttaatgcaaatgatttatggtacacatggtgatattccaaaaattgttgtagcaccaactgatgcagaagatgcattttatttaactatggaagcctttaatttagcagaacaatatcaatgccctgttatagttctaagtgatttgcaattatctttaggaaaacaaactgttgaaaaattagattataatcgcattgaaattaaacgtggtgaaatcattcaatctgatattgaacgtgaagaagatgataaaggttatttcaagcgttatgcgttaacatccaatggtgtttctcctagacctatcccgggtgttaaaggaggtattcatcatataactggtgtggaacacaatgaagaaggtaaacctagtgaatctgcgtcaaatagacaacaacaaatggaaaaacgaatgcgtaaaattgagcagttactaattgaatcgccagtagaagctaacttacaacatgaggatgctgatattctttatatcggttttatttctacaaaaggtgcaattcaagaaggtagtaaccgtttgaatcaacaaggcataaaagttaacactatacaaattagacaattgcatccattcccaacaagcgttattcaagatgcagttaataaagcgaagaaagtcgttgtagtggagcacaattatcaaggacaattggctagtattataaaaatgaatgtcaatattcatgataagattgaaaattatacaaagtatgatgggacacctttcctaccacatgaaatcgaagaaaaaggtaaaataattgctactgaaataaaggagatggtatagatggcgacatttaaagattttagaaataatgttaagcctaactggtgccctggatgtggcgatttctcagtacaagctgcaattcaaaaagcagccgcaaatatagggttagaacctgaagaagtagctatcatcaccggtataggatgttctggccgtctttcaggatatattaattcttatggcgttcactctattcacggacgtgcattacctttagctcaaggtgtaaaaatggcgaataaagatttaactgttattgcatctggaggagatggtgatggttatgctataggtatggggcatacaatccatgctttaagaagaaatatgaacatgacgtatatagtcatggataatcaaatttatggtttgacaaagggacaaacatcgccgtcatcagcagtaggattcgttactaaaacaacgccaaaaggtaatatagaaaaaaatgttgcgcctttagaattagcattatcatctggtgccacatttgtagcccaaggtttttcaagtgatattaaaggattaacaaaactaattgaagatgcaattaatcacgatgggttttcatttgttaatgtcttttcaccatgtgtgacttataataaaattaacacatacgattggtttaaagaacatttaacaagtgttgatgacattgaaaactatgattcaacagataaacaattagcgactaaaactgttattgaacatgaatctttagtaactggtattgtttatcaagataaagaaacaccatcatatgaatctcaaattaaagagttagatgatacaccactagctaaaagagatatcaaaattactgaagacacgttcaatgcattaactgaacaatttatttaataattaaaactgagtcgtataaatgtatttataacagatccatttatgctactcagttttttctattgacggattgtaatattaagtgcaacacctataaaaattcataaaaaatgcccataattggcactttgttgtaagatgttaataaccacaaaaacacatacaaggaagtgccaacatgagctataaccatcttacactaactgaacgcgcacgtatagaggttttacgtcaagaaaattattctttaagatctattgcacgtaaattaaaacgatctgtatctactatctcacgtgaaattagtaggaataatttaaatcagtcgtatcaagctgaaacagctcaaaaaaattatgaaaccaaaagaaaactttgtggtcgtcctactcgatttactccagaacttggtaatatcattaaatattatttaaaatgccactggtctcctgaacaaatcgtaggtcgtctattacaaaatcaaatctgttttaaaaccatctatcgatggattaactctaatatgattaatttcgaacttatttcatgccttcgtcaaaaaggaaaaagacagaaacctaaagaaactagaggtaagtttaatattggccgtcctatttcacaacgtcctaaggaagtaaagaaacgtaatacattcggtcattgggaagctgacacaattgtatccagcagaggcaaaagtaaagggtgcattgctaccttcgcagaaagaaaatcacgttattattattgtgtacttatgcctgatcgttcctctaattctatggagacggcaattaataaccttatcaaacatctacctaaaggtgccgttaaaactattactgtcgatagagggaaagagttctcttgttatcaaaatattgaaaaccaatttaatattaatgtctacttcgctgatccatattccgcatggcaaagaggtacaaatgaaaataccaatggtttactaagagaatttttccctaagaaaacagacttagctaaagtaaatcaagagcaacttaactatgcattagactcaattaattatcgaccaagaaagtgtttaaattggaagtttccttatgaagttttatgtgatgaactgttgcacttaaattgacaaatcaactattacaaaaaataaaggagtttttaaaaatgaaagacacattaatgagtatacaaataattcctaaaacaccaaacaatgacaatgttataccttacgtagacgaggcgattaaaataattgacgaatctggtttacattttagagtaggtccgttagaaacgacagtacaaggaaatatgaatgaatgtttaattttaatacaatcattaaatgaacgaatggtggaacttgaatgtccaagtattattagccaagttaagttttatcatgtgccagacggcatcactattgaaactttaactgaaaaatatgatgaataatattaaaagtgaagtaaactggatttgaattggcttgttagagatgacgtataactttaactgtttttgcactttatagttaaatttaatataattattaaatgatacgggcaaatagaaaggattttgtaaagtgaacgaagaacaaagaaaagcaagttctgtagatgttttagctgagagagataagaaagcagaaaaagattatagtaaatattttgaacatgtttatcaaccgcctaatttaaaagaagcgaaaaaaagaggtaaacaagaagttcgttataatagagatttccaaattgatgaaaaatatcgcggtatggggaacgagcgtacatttttaattaaaacatatggatgtcaaatgaatgcacatgacactgaggtcattgctggtatacttgaagcattaggctatcaagcaacgactgatattaacactgcagatgttattttaattaatacatgtgcgattagagaaaatgccgagaacaaagtgtttagtgaaattggtaatttgaagcatttgaagaaagaacgacctgatattttaatcggagtttgtggttgtatgtcacaagaagagtcagtagtgaataaaattttaaaatcgtatcaaaatgtagatatgatatttggtacacataatattcatcatttaccagaaattttagaagaagcatatttatctaaagcaatggttgttgaagtatggtctaaagaaggagacgttattgaaaatcttccaaaagtccgtgaaggcaacattaaagcatgggtcaatattatgtatggttgtgataagttttgtacatattgcattgttccatttacaagaggtaaagaacgaagccgtagacctgaagacattatagatgaagtacgtgaacttgctcgtgaaggttacaaagaaataacgcttttaggtcaaaatgtaaattcttatggtaaagatttacaggatatagaatatgacttaggagatcttttacaagcaatttctaaaatagcgattccaagagttcgtttcacaacaagtcatccttgggacttcacagatcacatgattgatgttatttcagagggtggtaatatcgttcctcatatccacttgccagttcaatctggaaataatgcagtattaaaaataatgggtagaaaatatacacgagaaagttatttggatttagtaaaacgaatcaaagatagaattccaaatgtagcattaactacagatattattgtagggtatccaaatgaatcagaggaacaatttgaagaaactttaactttgtatgatgaagttggttttgaacatgcatatacgtatttgtattcacaacgtgatggtacgcctgctgctaaaatgaaagataatgtacctttagatgtcaaaaaggaacgattgcaacgtttgaataaaaaagttggtcattattcacaaatagctatgagtaagtacgaaggacaaactgtaacagtactttgtgaaggtagtagtaaaaaagatgatcaggttcttgctggctacaccgataaaaataagttagttaatttcaaagcgcctaaagaaatgattggtaaactagtggaagtacgaatagatgaagctaaacagtattcattaaatggcagttttgtaaagcaagtagagccggaaatggtgattcaataaatgtataataaagatgacgtgttgaaacaagcggataatattgcaaataaaattaaaaatttggatactatcaaaacttatcaacaaattgaagcacagattcatcagaaccaaacgataaagactataatggatatgttaaaaaagcatcaaaaacaagcagtaaactttcaaaattacgggaaacaaaatgcgctagaacagtcggaacataccattcaaagtatagaagcagaaataaatacattgcccatagttgaacagtttcaagcttcacaatatgaagcgaatcaattattgaaaatgtttgtatcaacaatggaaacacgtttaaatgaccataataaagccaaacatagtgattaattacaaacaaaaaggagaacaatcatatgaaatcaagaaaactggctataactgcacttttaatttcaataaatgttgtattaagcagtattatcatcattcctctaggaccagttaaggcagcaccagtacagcattttgtaaatgtattaagtgcggtcatagtaggtccttggtatggattagctcaagcgcttatatcatcaattttaagagttctttttggaactggtacagcttttgcatttccgggtagtatgattggagttttattggctagtatgttttacatatatcgtaaacatatattcatggccgcggtcggtgaagtacttggaactggtgtcatcggaagtttaatttgtataccattagcatatttccttgggcttcaagacttcttcattaaaccgttaatgattacgttcatagtctcaagtgctatcggatctattataagttatttcttattaattactctaaaaaaacgtggtattcttcaaaggtttataaaataattttatgatatatgatttcaaacagagtcattgttcattttaatattgaacgcccttacttaattaaatgtcttgaatgttagaattttaatataattctaaacatgctcttaacacattttattaggtttgaggcgttttcttatacatttaagatgcttcgttattatatggtatgaataggtttgtaaaagtaagtatgttaaaatgtataagttaaataattaataattagaaagcttacaaacgaatatattgtaaagacaaattttaaaaagagacaagggttgtgaagaaataatatgtctaatgttacaccaatgatgcagcaatatttaaaaataaaatcagaataccaagattgcttattattttttagactaggtgatttctatgaaatgttttatgaagatgccaaggaggcatcacgtgtacttgaaattactttaactaaaagagatgctaaaaaagaaaatccaattccgatgtgtggtgttccgtatcattctgcagatagttatatagatacacttgttaataatggatataaagtagctatttgtgaacagatggaagatccgaaacaaacgaaaggtatggttagacgtgaggtagtaagaattgtgactccaggaactgtgatggagcaaggtggtgtagatgataaacaaaataactatattttaagttttgttatgaatcaacctgaaattgcgcttagttactgtgatgtttctactggtgaattaaaggttacacattttaatgatgaagcgactttattaaatgaaattacgacgataaaccctaacgaagttgttatcaatgacaatatttccgatcatttaaaaagacaaattaatatggtgacagaaacaataacagtcagggaaacgttatcaacagaaatctatagtgtgaatcaaactgaacataaattaatgtatcaagcgacacaattattgctagattatattcatcatacacaaaaacgtgatttatcgcatatcgaggatgttgttcaatatgcagctatagattatatgaaaatggatttttatgctaagagaaaccttgagttaacggaaagcattcgattaaaatcaaaaaaaggaacgctactttggctaatggacgaaacgaaaacaccaatgggagcacgccgcttaaaacaatggatagatagaccactaataagtaaagaacaaattgaagcacgattagatatcgttgatgaatttagtgctcatttcatagaaagagacaccttaagaacatatcttaatcaagtgtatgatattgaacgtcttgttgggcgtgttagttacggaaatgttaatgcgagagatttaattcaacttaaacattccatttctgagataccaaatattaaagcattactaaattctatgaatcaggatactcttgtacaagttaatcaactggagccacttgatgatttacttgatatattagaacagagtttagtagaagaaccaccaatttcagttaaagatggtggactattcaaagttggttttaatatgcaattagatgaatatcttgaagcttcaaaaaacggaaaaacatggttagcagaattacaagccaaagaaagacaacgtactggaataaaatcattgaaaataagctttaataaagtgtttggttattttatagaaataacacgtgccaacttgcaaaattttgaaccaagtgaatttggttatatgaggaagcaaacgttatcgaatgcggaacgatttataactgatgaacttaaagaaaaagaagatatcattttaggtgcggaagacaaagccattgaattagaatatcaattatttgttcagctacgtgaagaagttaaaaaatatactgaacgtttacaacaacaagctaaaattatttcagagttagattgtttacagagctttgcagaaattgctcaaaaatataattatactaggccttcatttagtgaaaataaaacattagaattagtggaatctaggcaccctgtagtggaaagagtaatggattataatgactatgtgcctaataattgtcgattagataacgaaacatttatatatttaattacaggtccgaatatgtctggtaaatcgacgtatatgagacaagttgccataattagtataatggcccaaatgggagcttatgtcccttgtaaagaggctgtgttacctatatttgatcaaatattcactagaataggtgcggcagatgatttggtttcaggtaagagtacgtttatggtagaaatgctagaagcacaaaaggcattaacttatgcaacagaggatagtttgattattttcgatgaaattggacgtggtacttcaacgtatgacggtttagctttagcgcaggcaatgatagagtatgtagctgaaacatcacatgctaaaacgttattttcaacacattatcatgaattgacaacattagatcaagcattaccaagtctaaaaaatgttcacgtcgctgctaatgaatataaaggtgaacttatattcttgcataaagtcaaagatggtgcagttgacgatagttatggtattcaagttgcgaaattagctgatttacctgaaaaagttattagcagagcacaagtgatcctaagcgagtttgaagcgtctgctggtaaaaaatcatcgatatcaaatttaaaaatggtcgaaaatgaacctgaaattaatcaagaaaattcaaacttaagtgttgaagaaacaactgatactttatctcaaaaagactttgaacaagcatcatttgatttgtttgaaaatgatcaagaaagcgagattgaactacaaattaaaaatttgaatttatctaatatgacaccaattgaggcattggtgaagttaagtgaattacaaaatcaattaaaatagaggtgttgcaaaatggggaaaattaaagaactccaaacctcattagcaaataaaatcgcagcaggtgaagtagttgaaagaccgagttctgttgtgaaagaactgttggaaaatgctatagatgcaggcgctacagaaataagcattgaagtagaggaatctggcgtccaatctattcgcgtagtcgataatggaagcggaattgaagcggaagacttaggattagtatttcatagacatgcgactagtaagttagatcaagatgaagatttatttcatattaggacattaggattccgtggtgaagcactagccagtatttcatcagttgctaaagtaacattgaagacttgcacggataatgctaatggaaatgaaatatatgtagaaaatggtgaaatattaaatcataagcctgcaaaagcgaaaaaaggaacagatatacttgtagaatcattattttataatacaccagcacgtttaaaatatattaaaagtttatacactgaattaggtaaaataacagatattgtcaacagaatggcaatgagccatccggacattcgaatagcactcatttcagatggcaaaacaatgttaagtacaaatggttcaggacgaactaatgaagtgatggcagagatttatgggatgaaagttgcacgagatttagtacatatatctggagatacaagtgattatcacattgaaggttttgttgcaaagcctgaacattctagaagtaataagcactatatttctatttttattaatggacgatacattaaaaactttatgctaaataaagcgattttagaaggctatcatacactcttaacaataggtaggttcccgatttgttatattaatattgaaatggatccaatcttagtagacgtaaatgttcatccaacaaaactagaagtgcgtttatcaaaagaagagcaactatatcaattgatagtgagcaaaatacaagaagcatttaaagaccgtatattaattcctaaaaataacttggattatgtgccgaaaaaaaataaagtgttacattcattcgaacaacaaaaaatcgaatttgaacaaagacaaaacacagaaaataaccaagagaagacgttttcatctgaagaaagtaacagtaagccatttatggcagaaaatcaaaacgatgagatagttataaaagaagattcatataatccattcgtaacgaaaacatctgaaagtttaatagctgatgatgaatcttctggttataataatacacgtgaaaaagatgaagactacttcaaaaaacaacaagaaattttacaagaaatggatcaaacatttgattcaaatgacgatacatctgtgcaaaattatgagaataaagcgtctgatgattattatgatgtgaacgatattaaaggaacaaaaagtaaagaccctaaacgaagaattccatatatggaaattgttggccaagtacatggaacgtatattattgctcaaaatgaatttggcatgtacatgattgaccagcatgcagctcaagaaagaataaaatatgaatattttcgagataaaataggtgaagttaccaatgaagtacaagatttattaatcccgttaacatttcatttttcaaaagatgaacaattagtcattgatcaatataaaaatgagcttcaacaagtaggtatcatgttagaacattttggtggtcatgattatattgtaagtagctatccagtttggttccctaaagatgaagtagaagaaattattaaagatatgattgagctaattttggaagagaaaaaagtagatatcaaaaaattacgtgaagatgtagcaatcatgatgtcatgtaaaaaatctattaaagcgaaccattatttacaaaaacatgaaatgtctgatttaattgatcaattaagagaagcggaagatccatttacatgtccacatggtcgtccaattatcattaatttttcaaaatacgaattagaaaaattatttaagcgtgtgatgtagagaggatgaatcaattgaataacaacatattgcctgccataagaaacattaaagatttagagaaactgattaaaacagattataaaatgtgtgttcttctagatatgcatataggacatattaaaagtattatggaattgctgaagcaaaatcatatagagtgttttattcatatagatttgataaaaggtttaagccacgatgaatttgcaagtgaatttattattcagcaatacaagccaaaaggtattgtatcgactaaatctaaagtaataaaaaaagcgaaatcattaaatactttaacgatttttagagtgtttattattgatagtcaagcattgaaacgcagtatagatttgataaaaaaagttgaacctgattttgttgaagtacttccaggtgttgcgagtaaagcgattcatcatattcagaaagaaacaaacacacaagtcattgcaggtggcctaattaacacaatagatgaagttaatgaagctgttaaaaatggagcgaaatatgtaacaactagttatgataaactctggtgaatcataagtctgcaaaaattatatttttcactagatttagtcatataacatattaaaaaagccgttttcatatgggatatgtaataaggaatttaaggtatcatacaaagaataatcaaataacataattaacacctctaaaacgattaaaatcattaaagttatagaggtgtttatttgtaaaaaatgcaactagtcataaaaaatatggctgaagaatgtcatttaaacaaaatggcgtcataaataatttagttaggattgatatttctagttttcaaattaaatcacttttataaagacttgaaaaattaaatttgacaaaatttttacaaaaaccattgacaacgctttcatctcaatagtattataacaaatataataaaagttaatacatagaatagagacgggagatttctacgagccaaactgctagtgtaggaatctctttgtctttttgggaggacatttaatatgaatgtatatttagcagaattcctaggaactgcaatcttaatcctttttggtggtggcgtttgtgccaatgtcaatttaaagagaagtgctgcgaatggtgctgattggattgtcatcacagctggatggggattagcggttacaatgggtgtgtatgctgtcggtcaattctcaggtgcacatttaaacccagcggtgtctttagctcttgcattagacggaagttttgattggtcattagttcctggttatattgttgctcaaatgttaggtgcaattgtcggagcaacaattgtatggttaatgtacttgccacattggaaagcgacagaagaagctggcgcgaaattaggtgttttctctacagcaccagctattaagaattactttgccaactttttaagtgagattatcggaacaatggcattaactttaggtattttatttatcggtgtaaacaaaattgccgatggtttaaatcctttaattgtcggagcattaattgttgcaatcggattaagtttaggcggtgctactggttatgcaatcaacccagcacgtgatttaggtccgagaattgcacatgcgattttaccaatagctggtaaaggtggttcaaattggtcatatgcaatcgttcctatcttaggaccaattgccggtggtttattaggtgcggtagtatacgctgtattttataaacatacatttaatattggttgtgcaattgcaattgttgtagttattattactttgattttaggttacattttaaataaatcatcaaaaaaaggtgatatcgaatcaatttactaaaataaaaagaaacgtaaatagcataatttaacatgtttgattcatggattatgctattttttcgccaaaatttaacagattttgtacaatgggttagcgattattttttaataaaggagatactactaatggaaaaatatattttatctatagaccaaggaacaacaagctcaagagcgattttattcaatcaaaaaggggaaattgcaggggtagcacaacgtgagtttaagcaatattttccacaatcaggttgggttgaacatgatgcaaatgaaatttggacatctgtgttagctgtaatgacggaagtaattaatgaaaatgatgttagagctgatcaaattgcaggtatcggtattacaaaccaacgtgaaacaacggttgtttgggacaaacatactggtcgcccaatttatcacgcaattgtttggcaatcacgtcagacacaatcaatttgttcagaattaaaacaacaaggatatgaacaaacatttagagataagacaggattacttttagatccgtattttgcaggtacaaaagttaaatggattctagacaatgttgaaggtgcacgagaaaaagcagaaaatggcgatctattatttggaacgattgatacttggttagtatggaaattatcaggaaaagctgcgcatattactgattattcaaatgcgagtcgtacattaatgtttaatatccatgatttagaatgggacgatgagttattagaactacttacagtacctaaaaatatgttgccagaagttaaagcttcgagtgaagtatatggtaagacaattgattaccacttctatggtcaagaagtaccaatcgctggagtagctggtgatcaacaagcagcattatttggacaagcttgcttcgaacgtggtgatgtgaaaaacacatatggaactggtggcttcatgttaatgaatacaggtgacaaagcggttaaatctgaaagtggtttattaacaacaattgcttatggtattgatggaaaagtaaattatgcgcttgaaggttcaatctttgtttcgggttcagcaatccaatggttacgtgatggattaagaatgattaattcagcaccacaatcagaaagttatgcgacacgagttgactctactgagggtgtttatgttgttccagcttttgtaggtttaggaacaccatattgggattctgaagcacgtggtgcgattttcggtttaacacgcggaactgaaaaagagcactttatccgtgcaacattagaatcattatgttaccaaactcgtgacgttatggaagcaatgtcaaaagactctggtatcgatgtccaaagtttacgtgtcgatggtggtgcagttaagaataactttattatgcagttccaagcagacattgttaatacttctgttgaaagacctgaaattcaagaaactacagctttaggtgctgcatatttagcaggtttagcagttggattctgggagagtaaagatgatatcgctaaaaattggaaattagaagaaaaattcgatccgaaaatggatgaaggcgaaagagaaaaattatatagaggttggaaaaaagctgttgaagcaacacaagtttttaaaacagaataaacttgtagattagacttttgtataaacattgtgatacaatcaatttaagttaatatttgaatcgagaaacgagagatttgttcgaacatgtacaattgaaggattgtttatgtgggacaagtctctcttttttacattttttaggaggcgttttggaatggcattgtctacttttaagagagaacatattaaaaagaatttaagaaatgatgaatatgatttagtaattattggtggcggtattacaggtgcaggtattgcactagatgcgagcgaaagaggaatgaaagttgcattagttgaaatgcaagactttgcacaaggaacaagttcaagatctacaaaattagtccatggtggtttacgttacttaaaacaattccaaattggagtagttgccgaaactggtaaagaacgtgcgattgtttatgaaaatgggcctcatgttacgactccagagtggatgcttttaccaatgcataaaggtggaacatttggtaaattctcaacatcaattggtttaggaatgtatgatcgtttagcaggtgttaaaaagtctgaacgtaaaaaaatgttatctaaaaaagaaactttagctaaagaaccattagttaaaaaagaaggtctaaaaggcggcggttactatgttgaatatcgtactgacgatgcgcgtttaactattgaagttatgaagcgtgctgctgaaaaaggcgcagaaattatcaactatactaagtctgaacacttcacttatgataaaaatcaacaagtaaatggtgttaaagttatagataaattaactaatgaaaattatacaattaaggctaaaaaagtggttaatgcagcaggtccatgggttgatgatgttagaagtggtgattatgcacgcaataataaaaaattacgtttaactaaaggtgtacatgttgttattgatcaatcaaaatttccattaggtcaagcagtatactttgatactgaaaaagatggaagaatgatttttgcaatcccgcgtgaaggaaaagcgtatgtaggtactacagatacattctatgacaacatcaaatcttcaccattaactacacaagaagacagagactatttaatcgatgcgattaattacatgttccctagtgttaatgttacagatgaagatattgaatcaacatgggcaggaattagaccattaatttacgaagaaggcaaagacccttctgaaatctctcgtaaggatgaaatttgggaaggtaaatcaggtttattaactattgcaggtggtaaattaacaggctatcgtcacatggctcaagacattgttgatttagtatctaaacgcttgaaaaaagactatggtttaacatttagtccatgtaatacaaaaggtctggcaatttctggtggcgatgtaggtggtagcaagaactttgatgcgtttgtagagcaaaaagtagatgtagctaaaggatttggcattgatgaagatgttgcaagacgtttagcatctaaatatggttcaaatgttgatgaattgttcaacattgcgcaaacatctcaataccatgatagcaagttaccattagaaatttatgtagaacttgtttatagtattcaacaagaaatggtatacaaacctaacgatttcttagttcgtcgttctggaaaaatgtacttcaatattaaagatgtattagattataaagatagtatcatcgatattatggctgatatgttagactactcaccagctcaaattgaggcttatactgaagaagttgagcaagcaattaaagaagcgcaacatggaaataatcaaccagcagttaaagaataattaatttgtacaatcataaactggtgtcctgttttaggggcatcagtttttttatatgagatacaatagtcaattgaaactaggcatcactaaatgtatgataataataaaagcgaatataaaaacgttgttattaaaggtgtgaaatgatgactgaaaaacaatttaaattaactgtacaagataatacgaatattgaagttaaagtgaattttacagatgtagattcaaaaggaattattcatatatttcatggtatggctgaacatatggaacgttacgataaattagcacatgcactttcaaaggatggcttcgatgtgatacgtcataatcatcgaggacatggtattaatattgatgaatcaacaagagggcattacgatgatatgaaacgagttatcggtgatgcctttgaagtagcgcaaacagtgagaggcaatgttgataaaccatacattataatcggacattcaatgggatccgttatagctagattgtttgtagaaacatatccgcaatatgttgatggtctaattttaagtggtactggtatgtatccattatggaaaggattaccaaccgttaaggtgttacaactgattacaaaaatttatggtgctgagaaacgggttgaatgggttaaccagttagtatcaaatagttttaataaaaaaatacgtccattacgtacacaaagtgattggatttctagtaatccaactgaagtagacaactttattaaagatccatatagtggatttaatgtgtcaaatcaattattatatcaaacagcctattatatgctacatacatcacaattaaaaaatataaaagtattaaatcatgccatgcctatattattagtttcaggatatgacgatcctttaggtgattatggtaaagggattttaaaattggcgaatatatatagaaaagccggcattaaaaatgttaaagttaatctttatcatcataaacgtcatgaagtgttatttgaaaaagatcatgacaaaatttgggaagacttgtttaaatggttgaatcaattttataaaaaataaagaaagtggaattaaatatgaataaaattaagccttttattgtagtaattgtggggccaactgcttcaggtaaaacagagcttagcatcgaactcgcgaagcgtatcaatggtgaaatcataagcggtgactctatgcaagtctacaagcatatgaatattggaactgcaaaagtaacacctgaagaaatggatggtattccacatcatttaattgatatcttgaatcctgatgatacattttcagcatatgaattcaagcgattagcagaagatttaattactgatataacgaatagaggtaaagttccaatcatagcaggtggaacaggcttatatattcaatcattaatatataattatgaattagaagatgaaacagttacacctgcacaattatccgtagttaaacaaaagttatctgcattagaacatttagataatcagcaactacacgattatttagctcaatttgatgcggtttctgcagaaaatattcaccctaacaaccgccaaagagtgttgcgcgctattgaatattatttaaaaacaaaaaaacttttgagtaatcgcaagaaagtgcaacaatttactgaaaattatgatacattattattagggattgaaatgtcgcgtaaaacattatattcaagaataaataaacgtgttgatattatgttggatcacggattatttagagaagtgcaacaacttgttgaacaaggctatgaatcttgccaaagtatgcaagctattggatataaagaattaatacctgtgattaacggacaaatgatttatgaagatgctgtcaatgatttaaagcaacattcacgccaatatgcaaaacgacaaatgacatggttcaagaataaaatgagtgttcattggttagataaagaaaatatgtcacttcaaatgatgttagatgagattacaacccagattaagtaaaaggagtccgacagatgattgcaaacgaaaacatccaagacaaagcactagagaattttaaagcaaaccaaactgaagtaactgtattctttctaaacggtttccaaatgaaaggtgttattgaagaatacgacaagtatgtcgtaagcttaaattctcaaggcaaacaacacttgatttacaaacatgcgatcagcacttatacagtagaaactgaagctcaagaatctactgaaagtgaagaataagttgtaatcatatgggcacgatttaatgactcgtgtacataacgtttgaagtatgataaatagatatagaaataaagtcatatgtgacatcaattaaatgatgctcaaatgacaagatacaatagaggaatgtttgtaataaaaacgcttcatataaaggtcgagtcaatatatgatacgactttatatgaagcgttttatttgctatgagctagtatattttataataacttttctatttctctttcgatttgaacaggttttttttgaggtgcaaatcgtttaacaacgttaccttcacgatccactaaaaacttagtgaaattccatttgattttcttattaaagaatccatgttgtgccgcagtcaaatatctaaataaaggtaattgatgttccccttttacgtctattttttgatgcatagggaaggtaacaccatagtttaatttacagttttgagctgcttcttcgcctgatccaggttcttggccaccaaattgattacaagggaaacctagaattacaaacccttgatctttgtatttctcgtataatgattgcaaaccttcgaattgtgaagtaaagccacattcgctagctgtattgacaattagcataacgtcacctttatatgcatctaatttgtaagtaacacctttatttgtttctactacaaaatcataaattgtctccattgaatcatcctttcgatttacttaaaatgtaccataaaatcgtgtaatagtctttactaaaactctatgatagaatactttgagtaggattttattaaggagatgtataacatggctcagcaacaaattcatgatactaaaaataaactagaaaaagctgtattagtcggtgtacatgctcaagatgataagcaatttaattttgagtctacaatggaggaattatcatctttatcagagacttgccaacttgaagtgttgggtcaaattactcaaaacagagatcgtgtagatcgcaaatattatgttggtaaaggtaaaattgaagaaattcaagcatttattgagttcaaagatattgatgtagtcatcacaaatgatgaattaacgactgcacaatccaaatcactaaatgaagctttaggtgtaaaaattattgatagaactcagttgattcttgaaatatttgcattaagagcaagaagtaaagaaggtaaattgcaagtagagctagcacaacttgattatttattacctagattgcaaggccatggtaaaagtctttctcgtttaggtggcggtattggaactagaggccctggtgaaacgaagttagagatggatcgtagacatattcgaactcgtatgaatgaaataaaacatcaattgcgaacggtagaagaacatcgcgaaagatatcgaaataaaagaaatcaaaatcaggtgtttcaagtagctttagttggttatacaaatgctggtaaatcatcatggtttaatgttttagcaaatgaagagacgtatgaaaaagatcaattatttgcaacgttagatcctaaaacacgacaaattcaaataaatgatggatttaatttaattatttcagatactgttggttttatacagaaactacctacgacgctaattgcagcttttaaatcaactttagaagaggctaaaggtgcagatttattagtacatgtcgtagatagtagccatcctgaataccgtacgcagtatgacacagttaatgatttaatcaaacaattagatatgagtcatatttctcaaatagttatttttaataaaaaggacttatgtgatcacgcatcaaatcgtccagcaagtgatttgcctaatgtttttgtttcatctaaaaatgatggtgataaattacttgttaagactttatttattgatgaaatcaaaaggcaattaacttattatgatgaggcaattgcgacgaataatgcagatcgattatattttctaaaacaacatacattagtgactgaacttaaatatgatgaaattgaaaatgtttatcgtataaaagggtttaaaaaataataaaaggacgaaattcaaatgaaagatataagtaagatagtagctgacgtcgaatcaacgttagcaccatattttaaagaaattgaagaaactgcatatattaaccaagaaaaagtattaaatgcatttcatcatgtcaaagcaaccgaaagtgatctacaaggatcaacaggatacgggtatgatgattttggacgtgatcatttagaagaaatatatgcgcaggcatttaaagcagaagatgcaattgttcgcccacaaattatttcaggtacgcatgcgattactattgcattacaaagtttattaaaacatggtgatgaattaatttatataacgggaagtccatatgacactttacttgaagtcattggtgtaaacggaaatggtattgaaagtttaatggagcacggcgtatcatataaagatattgcacttaaagaaggtaaaatcgatattgaaagtgtgttagatgggatttctgagcgcaccaaagtaatagcgattcaacgttcgaaaggctatgatcaaagaccgtcaattcctctagatgaaattgaacaggtaattactaggttgaaaaacgtgcatcctaatattttaatatttgtggataactgttatggggaatttgttgaaagacgtgaacctatagaatgtggtgccgatttaatagcaggatcattaattaaaaaccctggcggtggtttagctaagattggtggatacattgctggtagaaaagatttaattgaacgatgtggttatagattgacagcacctggtattggtaaagaagcgggtgcatcattaaatgcattgcttgaaatgtatcaaggtttctttttagcaccacacgttgtcagtcagagtcttaaaggtgcattgtttactagtttatttttagaaaaaatgaatatgaacacaacgccgaagtactacgaaaaacgaactgatttaattcaaacagttaaatttaaaacgaaagaacaaatgatttcattttgtcaaagtattcaacacgcatccccaattaatgcacattttagtccagaacctagttatatgcctggttacgaagatgatgttattatggcagctggtacgtttattcaaggttcatcgattgaattatctgcagatggacctattcgtcctccttatgaagcatatgttcaaggaggattaacatatgaacacgttaaaattgctgtgacaagagctgttaagcagttgaaagaacaaggacttatataatagattaaatttcaccctaaatgataatgtgttttgggtgaaatttttttgcgaagatttatcagattatttttaaaaattgaaaaaatattttaactgtagttcgttttatgtcgttttagaagtcgaaatcgcagttatatcaatgttttgagctttatgttagaaaacctgacatatttttgaaatcctaaaaaaattatgataagttattaacaagttcaaaagtagaggagaggaacaatgatatcgaatgatgcaatcagacgaaatatggctgtcttctctatgagtgtagtaagtaagttaacggatttaacgccaaggcaaatacgttactatgaaacacatgaactcatcaaacctgaaagaacagaaggtcaaaaacgtctgttctcactcaatgatttggaaagattactagaaattaaatcattattagaaaaaggatttaatatcaaagggattaaacaaatcatttatgactcacaagagcatttaacaacagatgaacaagagataagaaaaaagatgattgtagatgccacgcaaaagcctattggagaaactttgccaataaatcgtggtgatttatcccgatttattaaataaaatttggaggattttaaaatgccaaaacgtactttcactaaagacgacattcgtaaatttgcagaagaggaaaatgtaagatatttaagattacaattcactgatattttaggaacaattaaaaatgttgaagtgcctgtaagccaattagaaaaagtacttgataacgaaatgatgtttgacggttcttctatcgaaggtttcgtacgtatcgaagaatcagatatgtacttacatccagatttagatacttgggtaatcttcccatggactgctggacaaggtaaagttgcacgtttaatttgtgatgtatataaaacagatggaacaccatttgaaggggatcctcgtgcaaacttaaaacgtgtattaaaagaaatggaagatttaggcttcacagactttaacctagggcctgaaccagaattcttcttgtttaagttggatgaaaaaggggaaccaactttagaacttaatgatgatggtggatatttcgatttagcacctacagatttaggtgaaaactgtcgtcgtgatattgttttagaattagaggatatgggcttcgatattgaagctagtcaccatgaagttgcccctggtcaacatgaaattgactttaaatatgcagatgctgttacagcatgtgataacatccaaacatttaaattggttgttaaaacaatcgcacgtaaacataatttacacgcaacatttatgcctaaaccattattcggtgtgaatggtagcggtatgcactttaacgtttcattattcaaaggtaaagaaaatgcattctttgatccaaatactgaaatgggcttaacggaaactgcatatcaatttacagcaggtgtgcttaaaaatgcacgcggatttactgctgtatgtaacccattagtaaactcatacaaacgtttagttcctggttatgaagcaccatgttatattgcatggagcggtaaaaaccgttcaccgttaatccgtgtaccatcttcaagaggattatcaactcgtattgaagtacgttcagttgacccagctgcgaacccatatatggcgttagctgcaattttagaagctggtttagacggtattaaaaataaattaaaagttccagaacctgttaaccaaaatatttacgaaatgaatcgtgaagaacgtgaagcagtaggcattcaagacttaccttcaacactttatactgcattaaaagcaatgcgtgaaaatgaagttattaaaaaagctttaggaaatcatatctataatcaatttattaattcaaaatcaattgaatgggattactatagaactcaagtatctgaatgggaaagagatcagtacatgaagcaatattaatacgctaaacaatgatgggaaatcagtaatatcaagggctagagcgttttgctttagctcttttttgatttggaaaggtggacaatctataattttatctttaaattttaattgctgtccactttttgttgaaaaatggattttgtcaagttttggtcaagtaaatgttttatgtatttatttttttaaagctggggaagaccattttatattttagttcacatgaattttaatatatttggaggtgatgagatgaggcgataaaagaacgtcgcgaaaacattgagtattacttgaaaatagccacattcatattacttctcatcgaattcatttgcagaacgttctaaggtaagaccccgaaaagaggggccttactactcattattaagggggtaatactatatgaaaagagaaacaaaacaaaaaatatctttttgtttatcgatcggtattttcattttagttatactactattgatattctaaaaaattaaaaatttcgcctcatctaatttatgaattgctatgatgaaatatacaatacaatcaaaaaattgatagaaaacaaagagatatcgagttatcaaattaataaagatactgggataagttacggtaatattaatgctatgcgccgtggagaaagaagaatagaaaatttaagcttaaagaatgcaaagatcttatatgaatatgcgaaaaaggtattataatataagcattgagttcaataggcatacaataactgcccaaactagtgactgagtgggtgtttttatagtattaaaagttttctaaaagtgaaagaaatcatgtttagtgatttacttatgtttttcaaaatagtataataattttatataatacatagaacttcagtataccttttgagtatatatggagttctttcttttttacaagatgtatatgtataaatggaaatgtttattacattacataaaaacctttaggtgctcttagatggatgttaatcataaaacaaagtgattttgaaaaatataggttattataatttagaattggaaattataaatcttgtcattggatatgggaattcaaacatatcacttacaacaatttgtggaatgttaaataactataaagaggaaaggagaaaaaatgataagaatggttaaagaaaaagaacgaatagcaaaattaaatttcgaatagctgtgacgagcataataattcaagtgcttaattttatcaaatcgttcttttaaaaaggtaaagaacaaaagacctttaccacattaaatagggaggtggtatttatgacaagagaattaaggaaaaaattaactctctatcttaacattgcaactttaatattatttattattaatttaacaagaaaaaaataaaatattctttaatttttacaaaaattacgaaccagtttaaagaaatttataatacaatagaaaaattactaaatgataaatcaatatctaattatagaattaatcaagacactggtgtttcttatggtggtataagtgaattaagaagcgggaaaagaaaagtgaataatttaactttagaaacagcggaaaaactctataattaccaaaaacaattagaaataatgattgaagattaaaataaggccatatcttttgaaatatcatggagtgagccttttaaatcatctaattttaaagtatattaaatatggatagcttaatgtgaatataaataaaaaattatcaaataatataatataatatagaatagattgagacaaggaattttatcaatatataataaaaaacgccaatactattaggcattagtttatgaattaactagtttggcaactacaaagaaacaatgtattgctaaacgtagttactgcattaggataattataattataaatagaaagagagcgtgattaaaaatgaatgagattgaaactattataagtgaaatagaaaagttattaactaacaatacaccatatagtatttcaaaaaactcaggtgtaccacgtcaaacagttactgatttaaaggtaggtaatactaaaataaaggatgccaaatttaaaacaataatcaagttatacgagtatcaaaagttgtcagaaaataattcagagtgctaataaatataccttgtttgattaggtggacaagaaattaaatttctaatgatttcatggttgtctgtccatgctttgtccacctcaataaaattatctctaggtttttaaaattgtacatgtttaaacaatcaaatgtatgcatttttatattatcatttccataaaaatttaaatgatctttaagtgatgatatagaaggctgaacacagtaaataagttaactttaatgcagtattctatactatacatattttgtaataatgtttatgtgcataatttttcattgacaattttttatattaaattgtgtaattggcatatatgatgatttgtgataattatattgtaatatagcatttggttttatgattctaaaattaatagatttgaaaagtatactttatttcatgaaagtttttggtacatttatttgaaaatgtttttattacaaagttacatgcctaaatgtttcttaacaaaattaattcatcgagtgtaaagaatcgtgtggtaaacataatttatatagattataaggaggtgaaaatggtcgaggaagtaaaaacgataaaatagtttgaatgttttgattttaattctgataggactattgaatttgcaaactaataagaatgtgaggtttgatttaatacgaagtcatattctttgaataaaatattactttctcaccattagtaaaatgaagatgactattaaagtgcgaaaaacaaataaaaaagagaaaatagaatttttaatagggacgtttataattattttagtaatattagggttcaaaattatgaaataaatgtatagtatttgagaagtctatatgactccggaaaaattaaagtctaaagatatctctatatctcaaatttaatagactactggagttagtagtttgaatattgaaagacactaatctaataaaaatacataaaaggttaaacattgaagtttagtaaaaggcgtaaggtatacaagacaaatcgtttgtctttgacaaagtaattgatgatgaaaagttgttaatatgtagaaacaaaaattgaaaatatgaaatttaactattatgaagtgatgatagctattaatgaatagaaaaataataaaatcatttataaataaaaaatacgttgagttcacagaatttcgaaaaaaagtagtaaacattgtacagatatggagatgaaaaaaatgtcagaatacaagaaaaagataattgaattaattgaaagtaatttaacaggatatgaaatttctaaaaaaactggagtttctcaatatgtactttcacaattaagacagggcaaacgcgaagtagataatctaaccctgaatacaacagaaaaattatatgaatatgccaataaagttttgtaatataactactgtataaattaatcaagctatgtttatttgattaaactattaataaaaatcatatggtgaatagatattataataattaaaatacaaaaatagtagattccaatttgtgaaaaaggagtatgtcgtttcatttagaatttattgcacgaaattagcatcgaataagggaaaataagtgttaagttttaaatgataaaaaagattggaatggatcgtcttgaaatgctcccttcaaagttttcatttttcaatgtctacttcgaagggggcatttccattaaattgttatagctatttatatttgtataatgaacatataaggttaagtaggtgcgagtgaaggaaataaaaaagctcaaatgtactaaatttttaatcttaataaatctctactttataaagattgaatggacattcgagcgttaatcagtcaggagggaatttcactcctacaatgtaataataatacttgcttcaccactatacaaggagtgagttgttatgttcaaagtgaattattcgattttaagttattatccagatatttatctccatagtaatttagctgtaggtgtggcatttgaaattataggagaaagttatcataagaatgaaattaaatttataacccaaagaagaaaaatttcatcatttgatgatgaaatagacaatttagtacttattaatatgtttttggatggacttaaatgtgaattcgaacaaactaatcaatcaataaaaaattataagaaaaagtttgttaataatttttactttgagaatattgaatataaaatgtttgactcattaaaagaagttaataattttattgaaaaaacatataaatatgtattacatattggtttagataaaaaagaaagacttaagaaaactgagaaagaacttttgaatagctaagtaaaaaggtcaaacatattgttctgaatataaataagtaataaccgtacctttattgatgcggttattttttatgtgttgatttgtcaatttaagtgcaacagttcatcacataaaacttcataaggaaacttccaatttaaacactttcttggtcgataattaattgagtctaatgcatagttaagttgctcttgatttactttagctaagtctgttttcttagggaaaaattctcttagtaaaccattggtattttcatttgtacctctttgccatgcggaatatggatcagcgaagtagacattaatattaaattggttttcaatattttgataacaagagaactctttccctctatcgacagtaatagttttaacggcacctttaggtagatgtttgataaggttattaattgccgtctccatagaattagaggaacgatcaggcataagtacacaataataataacgtgattttctttctgcgaaggtagcaatgcaccctttacttttgcctctgctggatacaattgtgtcagcttcccaatgaccgaatgtattacgtttctttacttccttaggacgttgtgaaataggacggccaatattaaacttacctctagtttctttaggtttctgtctttttcctttttgacgaaggcatgaaataagttcgaaattaatcatattagagttaatccatcgatagatggttttaaaacagatttgattttgtaatagacgacctacgatttgttcaggagaccagtggcattttaaataatatttaatgatattaccaagttctggagtaaatcgagtaggacgaccacaaagttttcttttggtttcataatttttttgagctgtttcagcttgatacgactgatttaaattattcctactaatttcacgtgagatagtagatacagatcgttttaatttacgtgcaatagatcttaaagaataattttcttgacgtaaaacctctatacgtgcgcgttcagttagtgtaagatggttatagctcatgttggcacttccttgtatgtgtttttgtggttattaacatcttacaacaaagtgccaattatgggcattttttatgaatttttataggtgttgcacttaatattacaatccgtcatgtaaaaaaacgaaaaaagttttaaaaaaagtgttggatacaaaacaggttggaaagagaagaaaaaatgacaaatatcgcaaaagccaaaagcgaaatcttccgcaactacactttaggctttgcaacacttgccacaataataaaaatgttttttatagagggggatatcccctccctcgtattatattacgaggtgatgaaaatgacaaacttaactaaaattagaataataatctttattaattatctaatcggaattttagctttaatatttgccttttatataatcttaatgtcaatagcggtttaaaaatgctgttttatggcggtttgaaaatgtagttttttagcagcttaagattgtcgtatatttaatgatttttcggttttataatcttttaatcgatatgattctccagtaattttaaatacttttgaatggtgaactaaccgatcaattatagctgctgatacaatcttattactaaatgactctccccaactcgaaaatgtaatattagtcgtaattattgttgatttcatttcatattttagtgacattaactggtagaataaatcagcttgttctttggtgatggcagaataacaaatttcatcaatgataagtaactctattctgcttaattgttttaatgttttattaatgatttctttggaatctgtgacagttaataagtctattaattctttgaaagtatagaatctagtctttatattttgtttacatgcctcaattcctaatgagattgttaggtgtgttttaccaacaacacggttatctaagaaacaaatatttatattatcttcaaaaaatgttatttttttagtctcattttgtattttatttttacagtattctcgtagaatagtatatttaccttcatatcccttttcctctatatatttaaaaatggccatagctgtatatcctaattcaatttttttattattaatttctttaaatgaatctagttttgatgtttacttattttgttgtcttttcttcaatcgttctaattcattttcttttcctgcttcataatattttttaactgttattggatcacaattatattgtcgaccaagctcagcataatttggtttaatacctttcgtaatgtaaaatagcactccttcataaatgtcatgtctcaattaaataagctccaatcgaagattgagttaaaacatgattatataatttaaaaaagaaaaaatgtattataaatcagtacgtcaaaggaataaggatatagaagtagatataatttctaaaaataccaatttgaattaaaacctagttaaaagagcgtatgaacatttgtttaagaataaatatgattagataactgtattaataatttctatccagattataatattgcagtaagttggcaatgtttaagagaaggaaaaacaataaaaaacaagatttaatactacttcgtcaagaggcacttgaacattatttgatgaataaatataattattactatagagaagcacatgggattgtagaaagaaaatacaatttttctagttatattgagaaatagggtgatatgattgattatttatgagaaagttaaaagaagatgatcaagttattgtatatgagtatattccacaagataaaatagaaaaagggaaaggtgaaataacagtaaataaattagattcaaaggtaattgactataaattatcaaaagttgaaaatgaaaaaggtattttagtttatagagataaatcatttcatgcaatattaaattttattgatgaaaataaatttccaaatgaatatatatatgcatggtattaaagcatcctttctacatagataaagagaaagtggtgctatttttatatgcttttttaactatttactgaaatagcagaatcacaaaagttaacatatttaaaagaacttggtgaagatggcgaatataaatatgttgccaaaatagatagtaaaacatctaaattatgtcattcactcaacggaaaaatatttaaagttaaagatatgataccaggtgtgaatgcgccacctatgcatccttggtgtagaagtaccacagtgccacatgtcggcagttggcgagacaagttctttaaagagcgtgaaggtaaatatcaagtagaagatgacacaaccaaagatgaattacaacaagctaaagtattaggaaagaaaatatatattactgatcaagcgattgataaagtaagatacgttgatattccaacacataccaaagaagaaaatcaatttatacaagaacaacataaagccttgcttaaagacgccaaagaaaacaatgatagcaatgaagtagcttatttattaaaagatggtaaagttacaaaagtatatggtgatcaagatagtgtatcttttgcaccaggggaaaaagaaacagaattgttatttaacagtaaaccgaattcaattgttatgttacataaccatcctgggcagtctagtttttctcttacagacttgtatttatttatatttaataattctattaaaacactgacaattgttacaaataaaggtcaaacaaagtacttaactaagacaaaagaatattgcaaatcaacttgtattgattgtattaaaaaatataataaaaataataatataaaaaattcaatcataaggatattgatatgattctaaagagattatataatagtggtaacataatatataaagttaggtgattaaaatgtattttgcacagttagatggtgaaataactaataaacagtcacaagaattattggataaagaatacaagaaagcaatagaattagaaaataagaataaagaacaaaaattagaaaaatagcatcctttctacacagataaagagaaagcggtgctatttttatacacttttttaacaactaaggatacaagacacataccttcaacaatatcctcatctaaacctattgatttcctaagctcaattttaaacacaaagtttatttgaaaagatgcacacctataaaaatcttaatcatcgaaaagtcacaaacatctccatattaaatcttaaatagtgcatttcatttaaactaaacatcgatattcctaccaatatagacttagtaattcgattgttaatacatcactttcataaaataactaaaactatcataatacttctcaaatctcgtcaaattaaagtaaatacagcacaaattaacatttttaaatatataaataaaataaaacaagatactcaataatctgtagtaccttgttttggaataatgtaattttatatcatcaacggctacaaatgagcagtttcatatataaataaacacaactactcaactgatcttgattaattaataaatgatttgccagatgacatataacagcattattagattaattctaatagtttatttaaattttcttcggttgtcgcccaactggttgcgaatctaacaacacgatgttgatcatcgtatttttcccaaacagcaaatttaactttttgttctaactctgctattttctcgttacttaaaataaaaaattgttgattggttggagaatcaaagtaaagacgatagcctttatttataaacccgtctttcatcttatttgccatttcgatagcatgtctgcttatattaaaatataaattatccgtaaataattctaaaaattgtatgcctgttaaccgtccttttgctaaaagggcaccgtgatgtttgattcgagtggtaaattgtttcggttcattattcttcgtaaaaacaattgcttctccgcataatgcacctatcttcgtaccacctatataaaatacatcacaatatttagcgatgtctttaatggtcatatctgattgatcactcatcaatccataccctaatcgtgcaccatccataaataatggaagctgatattgcttacatactttgcataactcttccaattctgatttagagtataatgtgccatattctgtaggatgagaaatatataccattcctgggaataccatatggtcctttttaaaatcacttttaaatgtctccatgtaagtttcaacatctgaagcactaacttttccttccttagagggtatagtaattactttatgtccactatattcaattgcaccgccctcatgcacagcaacatgaccagtgtctgctgaaatgaccccttcgtaactttctaacattgaattaataacaacctgattggtttgtgttccacctactaaaaaacgaatagtagcatttggacaatcaattgtatctttaatcttttcaattgcctgagctgtgaattgatcaaaaccatatcccgaagcttgtacaagatttgtatctactaatcgttttaatactttttcatgagcaccttctaaataatcattttcaaatgaaatcactacatttccccctaaaactaatacaacattttaataagataaaccaatttcaaaactagttcgatatttaaaatgtattatgaatggttaaagtttgtatcgcattatcgcgaagttgaataaatatattatacatcaaacaatacattatgaaaattaattaattttttaccacaattactttgcgtgccgaaacacatatattaatgattgaattttactgttaaaagttctatgatttaggaaatagagaaaagaggggatttaaatggaacaaattaaacttaaaacttttacagctgagactttagaattattagaatcaaatatcaacgaatttttaggttctgaagaagctgcaaatttgaaattagtaaatattacaataaaagaaattgaagaaagaacatttccaaataatgaagaagagtttaatgcaatattaactttatctgtaaataaataatctggaacgaaaggtgcaaaaaatatttttgtgcctttctttataggagaaaagactatgcaatttacattttcaaacgatttaggaacgttatttactattattttagccattggattcatcattaatttagtattggcttttattattatctttttagaaagaaataggcgtacagcgagttcaacttgggcatggctatttgtactttttgtcttaccattgattggttttattctttacttgttttttggtagaaccgtttcggcacgcaaattgaataaaaacaatggtaacgtgttaacggatttcgatggacttttaaaacaacaaatagaaagctttgataaaggtaattatggtactgataacaaacaagttcaaaaacatcatgatttagtacgtatgcttttgatggatcaagatggttttttaactgaaaacaataaaattgatcattttattgatggaaataatttatatgatcaagttttacaagatattaaaaatgctaaagaatacatccatttagagtattatacattcgctctagatggcttaggccaaagaattttaaaagcgttagaagagaaattgaaacaaggtctagaagtgaaaattttatatgatgacgttggttcaaagaaagttaagatggctaattttgatcattttaaatccttaggtggagaagttgaagcattttttgcttctaaattaccgttattgaatttcagaatgaataatagaaatcatagaaaaatcatcgtaatcgatggtcaactaggttatgtcggaggatttaacattggtgatgaatatctaggtttaggaaaattagggtattggagagatacgcatttacgtatacaaggggatgcggttgatgcactgcagttgcgatttattttagactggaattcgcaagcacatcgacctcaatttgaatatgatgaaaaatattttcctaaaaagaataaatcattcggtaatgcgccaatccagattgctgcaagtggtcccgccagtgactggcatcaaattgaatatggatatacaaaaatgattatgagcgctaagaagtcggtatatttgcaatcgccttatttcattccggataactcatatataaatgccattaaaattgcagctaaatcaggggtagatgttcatctaatgattccatgtaagccagatcatcctttagtttattgggcgacattttcaaatgcatctgacttattatccagcggtgttaaaatttatacgtatgaaaatggatttattcattctaaaatgtgtttaattgatgatgaaatcgtatcagtgggcacagcaaatatggactttagaagttttgaattaaattttgaagtaaatgcctttgtatatgatgaaaatcttgctaaagatttaagagcggcttatgaacatgatattacaaaatcaaaacaacttactgaagaatcttatgctaatagaccattgactgttaagtttaaagaatcgttagctaaattagtttcgccaattttataaagaatactttcaagtctcattttaatgaggctttttttatttttgtaattaaatactataattatattatgtaaaccattgaagtgacaaatgtcattttgaaccaatgacaaagtatcctattttaaatcgaataaatttactaatcttaaattaataaaatattaagaggtggttcatttgattcaaatatctaatattaataaatcatttaagaaaaagcgtgttttaaaaaacatttcagttggcattgaaaaaggctggatctaaatacaaacaaaaaagtattgagtgttttgatttaagagactttgaaagtgagtcaataatcaaaaacttactcaatacttttattttggtactcgcaagttagatttgttaactaatgttttcgtttattataaaacgaaacaatcaggtaaacgataaagcctacaaagatacccaataaaatagatagtactgccgtcactattaatggtaatttgaaaaatatttgtaggaaaataccaatgataattgcgataattactgcaattaatgtgactgtattttcatttgaaatgttcattcattttcactccttaacaataacattatatcatgctatagctttccaaaatattgaaatatgtagatatggctattgacgatatttcttaacttttatatgattaatcggaatgaaaaaagagaagtaggtggcaaaatgaagtcaaataaatcgcttgctatgattgtggtagccatcattattgtaggtgtattagcatttcaatttatgaatcatacgggtccttttaaaaagggaacaaatcatgaaactgtacaagatttaaatggtaaagataaagtacatgttcaaagagttgtggatggtgatacatttattgcaaatcaaaatggtaaagaaattaaagttaggcttataggggttgatacgccagaaacggtgaaaccgaatacgcctgtacaaccatttggcaaagaagcatcaaattatagtaagaagacattaacaaatcaagatgtttatttagaatatgataaagaaaagcaagaccgctatggtagaacattggcgtatgtatggataagtaaagatcgtatgtacaataaggaattagtggaaaagggacttgctagagagaagtatttttcaccaaatggcaaatatagaaatgtatttatagaagcacaaaataaagctaaacaacagaaattaaatatttggagtaaataattaaataggtgattatatatatattaaagtaaacatatacttgaagcatcgatttattattaccataaatttatatatagaaataatttaaaggcataataaccatagtgcgtatcgagcgtaatggattattatgcctttgattttacttgaatatagctgtgattcgatcaacctgttctttatttaaagggtgtttagatagctctatggcttcgctaataatacgtcgtaacgaagattttgttgaaactgtatcaacatatttatctctttcttcagaaccttgaatgatattaactgtaccatcactaaagtaaataacaccggtactttggactttaaagttaaagttttgttcaatatgatcctttaatgctttagcattatttgctgctaattgatacggatcataatcataaaaatcataaataacacgatttggttgaactgtttctgtaaaagtatagatagactttcttgatgaattaaactgatcatgatattgctgactaatgtaatgaccgacaactttttcaatattactattgctcatttctgtatcatgctcatcaggtacatcaaagtgataaaatgttttttcaccccaactttttacatcaacgtttattaaaccgatatctgaaacaatgataaaatcaaatgaacgtgcatactcgaaaaacggatgtttagtagctaaattgcttgtaacgataatatcataatattttaatttaccattttcgagatagctgtctaaaatcttgcgtaattctcttttagcatttttgtatgcatggtggccaacatcattattagaactcagcatttgacttcttaattcagcattttctgcacttaatgctttgttctttttaataagttgctttcttgcataaacttcggtatctattttactattactatacctttgatttaaaattaatataccaattaatgctacaatgataatgataagtacaacataaaaagacattttttcaccaatcctttttgacttctttaactttgtatacaataataattaataaagattaattgttattcaatttcccacatttttattagttgattttagttcatcattgttataatcaaattataaactgacagatattgatgttcaatgaatatgacgtgaaagattcgtgaattcaagtttatgtcgaatttatgttataacggtcatttaaatgacagaattaggtcactcatagtattttgaagattgaattcattaattttaaaatgtataatgatatttgtgaaagcgcttgcttaggaggtgtatttgagagtgaatgaaatgaatgctaaagaacaattagtggacaatttaatgaaaacatcatcgcaattatttaaatttcacggtgaagttgccatgcagcttttcttaaatgatgaattaaaattaccttctattgttgaaatatgcgtggaacgtaagcgtttaagtgatattgtgaaagttattccgcaatcatatgcgttactatacatagataagcaagatcaagcaatagctaaagaagatttatcactttcaaaaattgcaaaagtttatgtgcaatatgatgatacaacaataatgagtattttcgtttatgatgtagtaaacgatgaatggatttttagattggatccgaatatacgtatacctaagagtaacatatacttccatagtttaaattgggatgtggattatattaaaccggagatcgttctaatgtatgatctaatgcaacaccatcagtatcatcattattccaattataaacgtgtcatagatgcattaagctactatcaattttttattttaaaatttgtagtaggtgagcaacgtattaaggatgcaatccagagaacaataaataattaagaaaaagcaattcataacgcagttgaatacatgtgttacgaattgcttttatattagtttttattacacaagttttttaatgcaaccccgtgatagcaaaattcatatgtagataatacagctttttcagcatcatctacatgaattccaaacatcatcgaaatttccgaagcaccttggttaatcatttttaagttaatttttgattcagctaaggcatgtgtaattttatttgcagtaccaatgactttattcataccttcgccgacaatcattaaaattgctaaatcatgctcaatacttagctcatcaacatcacatttttgacgaatttcatttaatacttttgtttctttattttgaatttgttttgaacgcataacgatactgatagtatcaatacctgaaggcatatgatcaaatgaaatattattatcctctaagacacctaatatctttctagtaaagccgacttgtctattcattaaatactttttgatattaataacagtaaaatctttatcacaacttataccgctaatcacatttttcgcatttatttctctatcatgcactataaatgtacctttatcttgagggcggttcgtatttttaatcaccacagggatgcgatctttataaagtggttgtaaggcttcatcatggaaaacactaaaaccagcataagataattcacgcatttctcgataagtgatttcttcgattaactcaggatctttgatgatatttggattagctttataaataccagacacatcggtgaaattctcataaattgtggctctaacaccacttgatatgatggcgccagttatatctgatccgccacgtggaaatgtaactatatatccttcatgagatacgccaaaaaatcctgggataattagtttttcatcataatctcttaattttttaatttcagagtaagcactatctaatatttgtgcttcttgtgggacgtcagtaacaaaaatacccgcttccttcggtgatatatattttgttggtataccttgactattattatataaagctatcaattgcgcattaaaatcttcaccacaagaaagtaatgcatctaatagtctcttcggttcattttttaattgattaatataatgttccaaagtcacatctatcgtccgtaaaatactttcatccatttgcaattcttttacaatatcatcataacgctgaataatttctctttttttatcatgataatcaagatgattaatgaccttttcatataatctgattaacaaatcagttgttttaatatcattatcatgtcttttacctggagcagaaacgataacaatctttcgctctggatcagaattaacaatatttaaaacctttttaatttgagtagcattggagacggagctaccaccgaatttggaaactttcatagtgcatgccaacctttctaaaaaatcagaaaattgtattcagttttgtaagtaagaatgatattatgtatttatattttgaatattacgaactttacaaaaataaagaataattctatactatactatcatctagtgtttttcaataatacatttgtttttctcaaaagcacaaacggaggtacataaaatgaaaaaattaaatatagcattattaggattaggtactgtcggatctggtgttgttaaaatcatcgaagagaaccgacagcaaattcaagatacattaaataaagatattgtcataaagcatattcttgttcgagataaatctaaaaagagaccgctaaatattagtcaatatcatttaactgaagatgttaatgaaattttaaatgatgattcattagatattatcgttgaagtcatgggaggaattgaaccaactgtagattggttaagaacagcacttaaaaataaaaaacatgttattaccgcaaataaagatttattagcagtacatcttaaacttttagaagatttagcagaagaaaatggtgtagctttaaagtttgaagcgagtgtagcaggtggtattccgatcgtaaatgccataaataatggtttgaatgcgaataatatttcaaaatttatgggaattttaaatggtacctctaattttattttatctaaaatgactaaagagcaaacgacatttgaggaagcacttgatgaagcgaaaagacttggttttgctgaagcggatccaactgatgatgtagaaggggtagatgcagcgcgtaaagttgtcattacatcatatttatcatttaaccaagtcattaaattaaacgatgttaaacgaagaggaattagtggtgtaactttaactgatattaatgtagccgatcaactggggtataaaattaaattgattggtaagggaatatatgaaaatggcaaagttaatgcatcagtagaaccaacgttaattgataaaaagcatcaattagcagctgtagaggatgaatataacgcgatttatgtcattggtgatgccgttggtgacacgatgttttatggaaaaggagcaggcagtttagcaacaggtagtgccgttgtcagtgatttattgaatgtagcattattctttgaatcagatttacacacattgccaccacattttgaattaaagacagataaaacaagggaaatgatggattctgatgcagaaattaatattaaagaaaaatccaatttctttgtagtagtgaatcatgtcaaaggttcaattgaaaattttgaaaatgagttaaaggcaatattaccattccaccgatcattaagagttgcaaattacgataatcaatcatatgccgctgttatagttggattggaatcatcaccggaagaattaatcactaagcatggatacgaagttgacaaagtatacccagtagaaggagtttaattataatgagaagatggcaaggattagtagaagagtttaaagcacatttaccagtaaatgaaaatacaccaaaattaacattgaacgagggaaatacaccactcattcattgtgaaaatatgtctaaaatactaggtatagatttatatgtgaagtatgaaggtgccaatccgacaggttcatttaaagatcgcggtatggtaatggctgtgacaaaagcaaaagagaaaggtaagaaaattgtaatatgcgcttcgactggaaatacatcagcgtctgcagcagcatatgcagctagagcaggtttaaaagctatcgtcgtaataccagaaggtaaaattgcgttaggtaaactgtcgcaagcagtaatgtatggtgcagaaatcgtttctattgaaggaaactttgatgaagctttagaaattgtaaaagaaattgcaaaaagtggcgaaatcgagcttgtaaactctgtcaatccatttagaatcgaagggcaaaagacaggctcatttgaaattgtgcaacaattagacggtgaagcacctgatattttagcgattcctgtaggtaatgcaggtaatattactgcatattggaaaggctttaaagaatatcatgaagctaaaggatcacaattgccgaaaatgtttggcttccaagctgaaggcgcatcaccaattgttcaaaataaagtcattaaaaatcctgaaacgattgcaactgctattcgaattggtaatcctgctagttgggaaaaggcgactaatgctcttaaagaatcaaatggattaatagatagtgttactgatgatgaaattctagaagcatatcagttaatgacaactaaagaaggtgtctttagtgaaccagcaagtaatgcttctattgcaggtttaattaaattgcatagacaaggtaaattacctcaaggtaaaaaagtagttgcgattttaactggtaatggattaaaagatcctgatactgctatttcactactagataatccgataaagccattgccaaatgataaagatagcattatcgattatattaaaggagctttataacatgtcgaatgttttggagttaacaattcctgcatcaacagccaaccttggagttggctttgattctataggtatggctttagataaatttttgcatctgtctgtaaaagaaacatcagggacaaaatgggaatatattttccatgatgatgcatcgaagcaattacctactgacgaaacaaactttatttatcatgtggcacaacaagttgctgctaaatatagtgttgacttgcctaatttatgtatcgaaatgagaagtgatattccattggcaagagggttaggttcgtcagcttctgctttagtaggagctatatatatcgcaaattattttggtgatatccaactatctaaacacgaggtattacaattagcgactgaaatcgaaggacatcctgataatgttgcgccgaccatttatggtggtttaatcgctgggtattataatgatgtctcgaaagaaacgtcagttgcacatatcgacataccagacgtggatgtgattgtaacgataccaacttatgaactaaaaacagaagcatcaagacgtgctttaccacaaaaattaacacatagtgaagcggttaaaagtagtgcaattagtaatacaatgatttgtgcattagcacagcacaattatgaattagcaggtaaactcatgcaacaagatggctttcatgaaccgtatcgtcagcatttaattgctgaatttgatgaagtgaaaacaattgctagtcaacataatgcctatgcaactgtaattagtggtgctggaccaactattttaatatttagtcgcaaagaaaatagtggcgaattagttcgcgctttaaatagaaatgtagttacatgtcattctgaattagtggatattaatgttagtggtgttaaagaacgaattgtataccaatagacactttatattgtaaaatagtattgaatgtgaaatagagaggagatttaatgcgatatgacaaattataaagttgtcgttttagacatggatgacacattgctaaattcagataatgtgatatcagaagaaactgcaaattatttaacagcaattcaagatgaaggttattatgttgttttagcatctggtagacctactgaaggtatgattccaactgctagagatttaaaattacctgaacatcatagctatattattagttataacggcagtaaaacgattaacatgactaatgaagaagtagaagtaagtaaatcgattggtaagcaggatttcgatgaaattgtagattattgtcgagatagaggctttttcgttcttacatatcatgatggtcaaattatttacgacagcgaacatgaatatatgaatattgaagcggaattaactggtttaccgatgaaacgtgttgatgatatcaaagcatatattcaaggcgatgtacccaaggtcatgggagttgattatgtagcgaatattactgaagctagaattgatttaaatggcgtgttcaatgataatgtagatgctacgacaagtaagccattcttcttagaatttatggctaaagatgtttcaaaaggtaatgcaattaaagcgttatgtcacaaattgggatattcggttgatcaagtcattgcttttggtgatagtatgaatgataaatcaatgtttgaagtcgcaggtctagctattgctatggggaatgcatcagatgaacttaagcaatatgcagatgaaattacgttggaccataatgaaaatggtattccacatgcgctcaaaaaattgttataaattttaaaataagcctaagcacaggatatttgaataagatatcttgtgttaaggctttttatttatgtgaaaatgcgttagctataatatggcgtatttgaaatacatattatagattagtaatgatatctaaagaatagagtagatgcatatttttaaagtaaatcaagtattagctggtcactgaggtagataaataaatttgaatcattctgaataataacgaatgtattaaaaaatgcagtgacaatctaacattaattgttaaaatcactgcaagcatcttgattttatttagctgtttgtgtccagtcatgcttccctctgaaacgttttacatgagcatatatttggtcagcagtataatctaaatttgtataaactgtaatactgaacgctgattggttttcagcaaatgattcttcggaaaataattcctttaagtgcgtaaataaatcattcatttgtttatggtttaaaccgggatattcccttaaagttctctttaataattgtccgttcttttcttctaatgcttgaactacaataacaaatctctcatcttgctttagtacatcatcaaataaatttgtttgtccaatcattgaatttcacccctgaaaagttattgttatctatattatacacgatatgcaaaatatctaaaataaagaatggtaacatggtcataataaaatataaacagaatactagttaatacactttatactagaaaaagatattaaagtatatctactttacaccattaaaaaagcggcaaatgctatagataatctaaagcatctgccgtgtgggaatttatttatttttgattgccataatcgtgtggttttaaattaattgtttctagctttacaaattttgttttgtgaatgattttatgaataaagtaaatcaacgctagaatgattaaaggtaaaaagtttttaaaagcatttaaccattgatcttttaaaatatattcaactgaaccaccaaatagcaagaataatagcgtagcgatgacaatgattggtcctaatggataaaaaggtgctttatatggtaggaccttattaggatcttgaccttgttttttaatagcttgtcgcaatcgtatttgtgaccaaatgcttgatccccaaacaactataatcattgaaccaataatttcaagtaaattaaaaacggcatttgaattaaagtttgcataaataataacaataacaacgactgcatatgtagttaataatgctcttaatggtaattttgttgtcttgtttaatttacttaaaaatttaggtgcttttttgtctgaacttaaggaatacaacattctgcctgttgtataaacacctgaatttgcagcggataatagcgaagttaaaataaccgcattgattactgatgctgcaaaggctatgcctactctatcgaatacaattgtaaatgggctttgacttattgaactacttgctcttaataatgatggatctgtgtacggaataattgcaccaattactgcaattgataagacatagaataaaagaatacgccaaaatacttgtttaattgccttaggcatagactttttagggtcatctgattcaccagcagttactgctactacttctgtaccaccaaccgaaaatccagcgactaataatacgcctaagaaaccagagataccaccaacaaacggtgcttggccttttgtatagttttcaaatccatatgcatgaccacctaagataccgaaaatcattaaaaagccaaaaataacgaatacgatgattgttaacactttaattaatgataaccaaaactcagtttctccaaatgattttacagaaaaaatgtttaataatagtaaaattgtaataaagattaagctccaagtaatggggtggaaaaatttaaatgtgtcccagaaataaagcacatttgacgctactatgacatcaacacttgtaactaatgaccacaatgcccaatacaaccatcccatggtaaagcctagagatgagtcaataaagcgtgttgaataagagctgaatgaacctgatactggataaaatgttgccaactctccaattgatgccattaagaaatatagcatgacaccaataacaagataagcgagtatagcgcctccaggaccagcttgagaaatgatattaccagtagctacaaatagaccagtcccaattgcaccacctatagcaatcatggaaatgtgtcttgagttaagactacggttcattttattatcttccatatttagtctcccatctatttaaatatacccattattgtaagctttttaagtgtactattcaataactatttagtactgtaaagcgaaaaaattaaaattttctgattttttaatcatcttgagcatgtttaattgtaattctgatggggttaaattataatatgtattaaattataattattataaattgtggagggatgactatgtcacaacaagacaaaaagttaactggtgtttttgggcatccagtatcagatcgagaaaatagtatgacagcagggcctaggggacctcttttaatgcaagatatttactttttagagcaaatgtctcaatttgatagagaagtaataccagaacgtcgaatgcatgccaaaggttctggtgcatttgggacatttacagtaactaaagatataacaaaatatacgaatgctaaaatattctctgaaataggtaagcaaaccgaaatgtttgcccgtttctctactgtagcaggagagcgtggtgctgctgatgcggagcgtgacattcgaggatttgcgttaaagttctacacagaagaaggaaactgggatttagtagggaataacacaccagtattcttctttagagatccaaagctatttgttagtttaaatcgcgcggtgaaacgagatcctagaacaaatatgagagatgcacaaaataactgggatttctggacggggcttccagaagcattgcaccaagtaacgatcttaatgtcagatagagggattcctaaagatttacgtcacatgcatgggttcggttcacacacatactctatgtataatgattctggtgaacgtgtttgggttaaattccattttagaacgcaacaaggtattgaaaacttaactgatgaagaagctgctgaaattatagcaacagatcgcgattcatctcaacgcgatttattcgaagccattgaaaaaggtgattatccaaaatggacgatgtatattcaagtaatgactgaggaacaagctaaaaaccataaagataatccatttgatttaacaaaagtatggtatcacgatgagtatcctctaattgaggttggagagtttgaattaaatagaaatccagataattactttatggatgttgaacaagctgcgtttgcaccaactaatattattccaggattagatttttctccagacaaaatgctgcaagggcgtttattctcatatggcgatgcgcaaagatatcgattaggagttaatcattggcagattcctgtaaaccaacctaaaggtgttggtattgaaaatatttgtccttttagtagagatggtcaaatgcgtgtagttgacaataaccaaggtggaggaacacattattatccaaataaccatggtaaatttgattctcaacctgaatataaaaagccaccattcccaactgatggatacggctatgaatataatcaacgtcaagatgatgataattattttgaacaaccaggtaaattgtttagattacaatcagaggacgctaaagaaagaatttttacaaatacagcaaatgcaatggaaggcgtaacggatgatgttaaacgacgtcatattcgtcattgttacaaagctgacacagaatatggtaaaggtgttgcaaaagcattaggtattgatataaattctattgatcttgaaactgaaaatgatgaaacatatgaaaactttgaaaaataaatttgatatgtagtttctatattgcgtagttgagcagtttatgatatcataataaatcgtaaagattcctaacaagagagggtgtttaacgtgcgcgtaaacgtaacattagcatgcacagaatgtggcgatcgtaactatatcactactaaaaataaacgtaataatcctgagcgtattgaaatgaaaaaatattgcccaagattaaacaaatatacgttacatcgtgaaactaagtaattcttatcattcaaatacgacgatttgaaaataaagcgggcttacctattatatgggggagctcgcttttttatgaaatttttgtgaagagtgattaatgaattgagtttcattgatagaacaatatatgtttgtattagttgttactttattaaaaattgagaatattgatagaaggaaatagattactgattttataaagtgactctgttagcgaatgcttgaaagagtatttaatatagtagaatttaaaatttcaaagcggaatttaataagtaagaagtaattgtggatatgttttataaatgttcgacaatacactttgatgttaaatttgatggtttaaaaaatgatttaacaaagaaatgaaactttactgttgaattatgtgaggattgtgttattatataaatcgtaataattacgatttgataaaaagtgaggtaactatatatggctaagaaatctaaaatagcaaaagagagaaaaagagaagagttagtaaataaatattacgaattacgtaaagagttaaaagcaaaaggtgattacgaagcgttaagaaaattaccaagagattcatcacctacacgtttaactagaagatgtaaagtaactggaagacctagaggtgtattacgtaaatttgaaatgtctcgtattgcgtttagagaacatgcgcacaaaggacaaattccaggtgttaaaaaatcaagttggtaaaatcaaatttcgtactttagcccatttacaatatcaataaaacaatgtacagtatatacgaatgctataaactgaatgttttctcatattaataaggaaacattcggtttttaatttgcatttaaaaataattagtttttaaaggggctatttaaagtgaaaatatttgattacgaagatattcaattaatacctaataaatgcatagttgaaagtaggtctgaatgtgatacaactatccaatttggtccgaaaaaattcaagctacctgtagttcctgcaaatatgcaaacagttatgaatgagaaattagcgaaatggtttgctgaaaatgattacttttatatcatgcatcgttttgatgaagaagcaagaataccttttataaaacatatgcaaaattcaggcttatttgcatctatttcagttggtgtaaagaaagcggaatttgattttatagaaaaattagctcaagaaaagttaatccccgaatatattacaatagatattgcgcatggtcactcagattcagtgataaacatgattaaacatattaaaacccatatacctgatagttttgttattgctggtaatgttggtacgccagaaggtgttagagaattagaaaatgctggtgctgatgctaccaaagtcggtataggtcctggtagagtttgtattacaaagattaaaacaggttttggtactggtggttggcagttagcggcattaaacatatgtagtaaagcagctcgtaaacctttgattgccgatggtggtataagaacgcatggcgacatcgctaagtcaattagatttggtgcatcaatggtcatgattggttcattatttgcggcacacgaagaatcacctggtgaaactgtagaacttgatggtaaacagtataaagaatattttggtagtgcatctgaatttcaaaaaggcgaacataaaaatgtagaaggtaaaaaaatgtttgtagaacataagggttcattaatggataccttaaaagaaatgcaacaagatttacaaagctcaatttcatatgccggtggaaaagacttgaaatcattacgtactgtagattatgttattgttagaaactctattttcaacggtgatagagattaatatttatagtaggtgatgtaaattaaaaaattcatagtaactgttgttgcgtttttatcaattattatcattgcgccaataacagaatttaaaccattcattcatttacaaaatgaagtaagacaatatattgacattcacatcaataaagaaacaatttctgcagaaaataaattggatacgccgaagaaacaacaatttgcctttaataacattcagatgaatatgtcaaagtcagatgttgagaaaacattgaataaacccaaaagagttacatttaatgaatatggcacgaagtggtatacgtattatgatggtgattacaataattttataatggtaagttacattaaagataaagtaaatgcgttatatacaaatcaaaatatcatcacttcaaaatcaaaaattaaatacaatacaccgaaatcggttgtaaggcaaagattaggtgaaccagaaacagagattgttaaaggtagagtgcgttacgaacaaaataataaagaatatgatgttttccataaaaatcacatttatacgacggtattttatgataagcatcgacgtaataatgtaacagctgttttacaagtaagtgatgctatggaaaatagattaaaagaacaatatggagcaccttcgaaatcgcttgcagatagttttgaactacaaaattttgatttagttaatgctgaaagaaaacaacatcaattatctacattgaagtattctaaacagaattctgaaactgctcgtaagcatagtaaagatatggcaaaaaatcattattttgatcatacaaatttaaaaggtcaatcaccatttgatcgattgaaaaaagatggtattacatttaactcagccggagagaatttagcatatggtcaagttagtagtatctatgcacatcaaggattaatgaattctattggtcacagaaaaaatattttaaatgatacgtttaaaatattaggtgtaggtgttgattttaatgatgaaaaacaacctttttggacagaaaattatactggttaatgtttttggcatgagattaaagggtaatgtttgtctgtaaggaagtagataaacatgatgacaacagataaaccaaaagatgcggatatacttgaacgcgtcaaagatatacttaataaaaagaaagaaaaaaataataatggctcgctcctgtaaattattacgggggcgagttttaatttgtgtaacattttgcaggaatctgtaattcaaaatttatattaaagaatgagattatctaacaattcgcaatttctgtttgaactgaatttagattagaataaataaaacctcttgaaaacgaaactttttcaagaggtccaaaatttataaaaatgagggcttaacaattacgataatatataacggtttaaaatattacatttcgcgatacaaaccaattactttcccaattacagcaacattgtcgaggtaaattggctccattgtactattttcaggttgtaatcgataacgatttttttctttatagaagcgtttgacagttgcctcatcttcctcagtcatagcaacaataatgtctccattttctgctatggtttgactgcgaacaattactttgtctccgtctaatataccagcctcaatcatactgtcgcctacgacgtttaatatgaatatgtcgctattgtgtgtcgatgttaagtgttcaggtaatggaaaatattcttcaatattttctactgcggtaataggaacacctgctgtgactttaccaataactggcacatgaatcgtttcttccatattaatattatcatttgtttgatcacttacaatttctatagcacgtggtttcgttggatctcttcttatatagcctttttcttcaagacgtgaaaggtgaccatgaacagttgaactggatgctaagccaactgcttcaccaatttcgcgaacactaggcggataacctttcatttgaacaacttgtttaatatagttatatatttcgctttgtcgttttgttaattctctcatatataggcactccctaaattaatttaagtacagtatatcattaattcacaaccaaaacaaacatttgttcgttaaaatattgacacagaacataagttctgataaattactaatacaaacaaatgttctaggagtgaaaatgatgttttacaataaatataaaaacgtatcaacatatatcatcatatttttagtttcaagtgcagcctttgcaatattcttgttaagtgcgaacattagtgctcactcggaacaagtgtacgaaatgactgaccatcaaattaagaacaatacgataaataaagcatacgaacataaagaccctacaaacgatagcgaacaaagagatgggaaagtgttcgctttaataaattgatacattgtcacaacgttattttgcctatttttgcgaaatagcgttttttattacttttttgctgatcttaaatttgttatattttgttaaagtattataatgattgaataaacaaattgaaggtaggttttttaattgagtaattctgatttgaatatcgaaagaattaatgagttagctaaaaagaaaaaagaagtaggattaactcaagaagaagcaaaggagcaaacagcgttaagaaaagcttatcttgagagttttagaaaagggtttaaacaacaaattgaaaatactaaagtaattgatccagaaggtaatgatgtaacacctgaaaaaattaaagagatacaacaaaaaagagataataaaaattaaaacacaaatctgtaaagaattttctgacattataacttgaaataagtattttacttatctttttattttaaaataagttataatgtatttgataaaattgaagaagggaagatacacaagatgtttaatgaaaaagatcaattagctgttgatacgctacgtgcactaagtattgacacaatcgaaaaagcgaattctggtcatccaggattacctatgggagctgccccaatggcttacactttgtggacacgtcatctgaattttaatccacaatctaaagattacttcaatagagaccgtttcgtattatctgcagggcatggttcagcactattgtatagcttgttacatgtttctggtagtttagaattagaagaattaaagcaatttagacaatggggttctaaaacaccaggtcatcctgaatacagacatacagatggtgtagaagttactactggaccacttggacaaggttttgctatgtcagttggattagctttagcagaagatcacctagcagggaaatttaataaagaaggatataatgttgtagatcattacacatatgtattagcttctgacggtgatttaatggaaggtatttcgcatgaagcagcttcatttgctggacataataaattaagtaaattagttgttttatacgattcaaatgatatttcattagatggcgaattaaacaaagctttttctgaaaacacaaaagctcgttttgaagcatatggttggaattacttactagttaaagatggtaatgatttagaagaaattgataaagcgattactacagctaaatctcaagaaggaccaacaattattgaagttaaaacaacaatcggatttggttcaccgaataaagcaggaactaatggtgttcatggggcacctttaggtgaagatgaaagaaaattaacattcgaaaattacggtttagatcctgaaaaacgttttaatgtttcagaagaagtatacgaaattttccaaaatactatgttaaaacgtgctaatgaagatgaatctcaatggaattcattattagaaaaatatgcggaaacatatcctgaattagcagaagaatttaaattagcgattagtggtaaattgcctaaaaattataaggatgaattaccacgttttgaacttggtcataatggtgcatctcgtgctgattctggtactgttattcaagcaatcagtaaaactgtcccttcattctttggtggatcagcagaccttgctggttcaaacaaatccaatgtaaatgatgcaacagattatagttctgaaacacctgaaggtaaaaatgtgtggtttggtgtacgtgaatttgctatgggtgctgctgtaaatggtatggctgcacatggaggtttacatccatatggtgcaacattcttcgtatttagtgattatttaaaaccagcgttacgtttatcatcaattatgggattaaatgctactttcatcttcacacatgattcaattgcagttggtgaagatggtcctactcatgaaccaattgaacaattagctggactaagagccattccaaatatgaatgttatccgtcctgcagatggtaatgaaacaagagtagcatgggaagttgccttagaatctgaatctacacctacttcattagtattgacacgtcaaaacttaccggttttagatgtaccagaagatgtagttgaagaaggcgttagaaaaggtgcctatacagtttatggctctgaagagacaccagaattcctactattagcttcaggttcagaagttagtcttgcagttgaagctgctaaagatcttgaaaaacaaggtaaatcagtgcgtgttgtttcaatgcctaactggaatgcatttgaacaacaatctgaagaatataaagaatcaattattccatcaagcgtaacaaaacgtgttgcgattgaaatggcttcaccgcttggatggcataaatatgtaggtactgcaggtaaagttattgctattgacggctttggcgcaagtgcacctggcgatctagtagttgaaaaatatggctttacaaaagaaaatatcttaaaccaagttatgagcttataagaataatttataaagcgagtatgtttagaagtctaggatgcataatcttaggcttcttttaaagtgttgaaatttagagtatagcactcaaactacatcataagtgataagttttgaaaatatactatttcagattaatctttaaaatctctgttataacagcatgatttttgatattatttttagtatcgatattaaaatacttgaataaactagttcttgaaataatgtgatgaatttagtaaaattcagtaggataaagaaagcgggtgaaacaatggcaacttggttagcaattatttttatagtagcagcattaattttaggtttaattggaggtttccttttagctagaaaatatatgatggactacttgaagaaaaacccaccaatcaacgaagaaatgcttcgtatgatgatgatgcaaatgggtcaaaaaccttctcagaagaaaattaatcaaatgatgacgatgatgaataaaaatatggatcaaaatatgaagagtgcgaaaaagtaaattcgcaattgatagaggctattttccagatatggaaatggcctctttttataatcaaattaataagaataaatatgtttattaaaattaaagttaacaaaatgacgaatagactgagaaatgctataattcattttgtatgatttacagagagtttatttaacgagaaggtgtctgcgtgctctatttaatattttcaatcattgtagctttatttatgggaactatagttatagttattcgtatgaaagctcaaaattatccggtaaatgagaaaaaaatagttttgccaccgttttttatggcgactggtgcattgatgtacgtcgttccatattttagactaacaggatcggaaatgctagaagcttttataattggtttgcttttttccacagttctaatttggacttctcgatttgaagtcaaaggtacagaaatttatatgaaacgatctaaagcatttccagttattttgatttcattacttgtcattcgtactgtgatgaaaatattcattagtaatgaaatagatcctggagaattaggcggcatgttctttttattagcattctgtatgattgttccttggagagcagcaatgctatataaatacaaaaaactaaagaaaacattaatcaattaattactttcaaaaccacttgtgatcgacttctaaatcagtcaatgagtggttttaattttacttgaaaaggtgaaatgattatattaaaataaaagcgaacaaatgttctatatggaggcagtaatgaaaattatacatacagcagactggcacttagggaaaatattaaatggcaaacagcttttagaagatcaagcgtatattttagatacgttcgtagaaaaaatgaaagaagaagaacctgatatcattgtgatagctggagatttatatgacacaacatatccaagtaaagatgcaatcatgttattagaacaagcgattggaaagctgaatttagaactgcgtataccaataattatgattagcggaaatcacgatggtaaagagagattaaactatggggcgagttggtttgaaaataaccagttatttataagaacagattttacatcgattaattcaccaatagaaataaatggggttaatttttatacactcccttatgctactgtgagcgaaatgaaacactattttgaagatgacaccattgaaacgcatcaacaaggaattacgcgctgtattgaaacaatagcaccggaaattgatgaaggtgccgtcaatattttaattagtcatctgactgttcaaggtggaaagacatctgattctgaaagaccattaactattggaacggttgaatcagttcagaaaggtgtttttgatatatttgattatgtcatgctaggtcacttgcatcatccatttagtatagaagacgacaaaattaaatatagtggctccttattgcagtattcattttcggaagcgggtcaagcaaaagggtatagacgtgtaacaattaatgatggcattattaacgatgtatttattcctcttaagccgcttagacaattggaaattatctcgggcgaatataatgatgttattaatgaaaaagttcatgtgaaaaataaagataattatttacattttaaacttaaaaatatgtctcatattactgatccaatgatgagtttaaaacaaatttatcctaatactttagcgctgacgaatgaaacttttagttacaatgaagaaaataatgctatagaaataggtgaaaaagatgacatgtcaatcatcgaaatgttttataaccatataactgataaagaattatcggatatccaatctaaaaagataaaaaatattttagaaaacgaattgagaaaggaggattaatgaatgaaaccattacatttaaagttgaataatttcggcccctttttaaaagaagaaattgatttttctaaaattgataataatgaat

SEQ ID NO: 8 - DNA, 2782313 bp, Staphylococcus aureus 08BA02176 (residues 1,391,158-2,782,313 of 2,782,313)
tgtttttaataagtggtaagactggatcgggtaaaacaatgatttttgatgcaatgacttatgccttgtttggtaaagcatcaactgaacaaagagaagaaaatgatttgagaagtcatttcgctgatggtaaacagccgatgtcagtaacgtttgaatttcaattaaataatcgaatttataaagtgcatagacaaggcccttttatcaaagaaggtaatacaacaaaaacaaacgctaaatttgatgtatttgagatggtggatggcaagtatgaaattagagaaagtaaagtaatttcaggtacccaattcattattgaaatattaggagtaaatgcagatcaattccgacaattgtttattttgcctcaaggtgaattcaaacgctttttaatatcaaacagtcgtgaaaagcaagggatattaagaacactgtttaacagtgaaaaatttgaagctatacgagaaatattaaaagaagaagtaaaaaaagaaaaagctcaaatcgagaatagatatcaacaaattgaccttttatggcaagaaattgaatcatttgatgatgacaaaataaaaggcttattagaggttgccactcaacagatagacaaagtgattgaaaatataccacttttacaagctaggtcgaaagaaatactagcatttgtaaatgaaagtaaagaaactgctattaaagaatatgaaataatagaaaagaaaacactagaaaataatatattaaaagataatattaatcaactcaacataaataaaattgatttcgttcaattgaaagagcaacaacctgaaatagaggaaattgaagctaagttaaagttgttacaagatattacaaacctattgaattatattgaaaatagagaaaaaattgaaactaaaattgctaatagcaaaaaagatatttctgaaaccaataataaaatattgaatcttgtttgtgataagcgaaacatagacaaagagaaaaaaatgttagaagaaaatggagatttaattgaaagcaaaatctcttttattgataaaactagagtattatttaacgatattaataagtatcaacaaagttatctcaatattgaacgcttgagaacggagggtgaacaattaggtgatgaattaaataatctaattaagggtttagaaaaggtcgaagattcaataggtaataatgaaagtgattacgagaaaattatcgaactaaataatgcgataactaacataaataatgaaattaatgtaattaaagaaaatgaaaaagctaaagctgaattagataaactattaggtagtaagcaagagttagagaatcaaattaatgaagaaaaaactatattgaagaatctcgaaataaaattagatcgatatgataaatcaaaattggacttaaatgataaagaaagctttataagtgaaattaaatctgctgtaaagattggagatcaatgtccgatatgtggtaatgaaattcaggatttagggcatcatattgattttgacagtattgctaaacgtcaaaatgaaattaaagaaattgaagcaaatatccacactatgaaatcgaatattgctgtacataattctgaaattaaatttgttaatgaaaaaatatcgaatattaatattaaaacgcaaagtgatctctcactcgaagtgttgaataagcgtctgctagaaaatgaaaatgcattgaataatcaaagagagcttaataaatttatagaacaaatgaaagaagaaaaagataatttaacgttgcaaattcataataaacaattgcgtctaaataaaaatgaatctgagttgaaattatgtcgagatctcatcactgaatttgaaactctctcaaaatataataatatcactaattttgaggtggattataagaagtatattcaagatgtgaatcaacatcaagaacactcaaaggagattgaagataagttaatacaattgtctcaaagaaagttaattgagcaaaataatctaaatcactatgaaaatcaactagaaacttacaataatgacttagaattgaatgaacagtctattgaaatggaaatgtctaggctgaacttaactgataacaatgatatagatgaaataatagcctggagaggcgagcaagcggaattagaacagaaaagggatacttataaaaaacgttatcatgaatttgaaatggaaatagctaggttagaatcattaaccaagaataaagagttattggactctgataaattaaaagatgaatatgaattgaaaaaaggaaagatgaatacactgatagatgaatactctgctgttcattatcaatgtcaaaataatattaataaaacacaatctatagtttcgcatattaattacttaaatcaagaattaaaggatcaacaagaaatatttcaattggctgagattgtcagtggtaagaacaacaaaaatcttacattggaaaactttgtcttaatttactatttagatcaaattattgctcaagcaaatctgagattagcaacaatgtcagataatcgatatcaactaattaggagagaagcggtttctcatggtcttagtggcctagaaattgatgtatttgatttgcattcaaataagtctagacatattagctctttatcaggtggagaaactttccaatcgtcgcttgcattagctttagggttaagcgaaattgtacagcagcaatcaggaggtatttcactagaatcaatatttattgatgaaggattcggtacattagatcaagaaacgcttgaaacagcgttagacactttattaaatcttaaatcaactggtagaatggttgggattatttcacatgtgagcgaattgaaaaatagaatacctttagttttagaagtgaaatcagatcaatatcagagttcaacaagattcaaaagaaattaaaacataaaaaatagagatggtactttggaatgtatagaacaaccttagcccatctctttttatttaaaaattattttttctcacgtaataaatctctgatttcagttaataacacaacattttcttccacaactgcttcttcttcggcttcttctttcttcattaatgtatttgcaatcttaacaaagacgaataaagcaaacgcgatgataatgaagtcgataacagattggataaataaaccgtatttaataccccagaatgaccattctttagcaaaatcaactgatccgaaaattttaccaattaatggcataatgatattttctactaatgaagatataatcttgttgaaagctgcacccatcacaacagcaattgctaaatctaagacgttaccttttaaggcgaactctttgaattcttttaacattacactcaacctctcttttttaaatgtaacctcaattatacaacaaataaaaaaattagaaaatagattatttaagaaaatttgattatcgcaaagacctttgttatcctataaaggtgcgtgagttattgaataaaatgtttagataatatttttattctactacataaaattaaatatagaattgaagggagtaattaattatgaattcttcttcaccagagaatccaaatggaaagaagtattcaccagtcttcatctatagtgcaattgttgttgctatagtcgtattacttggtgcatttttacctgaacaattcaactatgttaccaataatattaaaatgtggattacagaaaagttaggttggtattatcttattcttactacgattatcgtgttcttctgtatattccttatttttagtcctattggaaaacttaaactaggtaaaccaaatgacaaacctgagtttaatactatttcatggtttgctatgttgtttagtgctggtatggggataggtttggtgttttatggtgcagctgaaccgatggcgcactttgctacgccacctacggcagatcccaaaactactgaagcttatactgaagccctacgttcaacatttttccattggggattccatgcttgggctgtttatggtgttgttgcgttagcgttggcatattcgcaattccgtaaaggtgaaccaggtttattatctagaactttacgtcctcttttaggtgataaagtagaaggtcctattgggatttttattgacgttttatctgtatttgcgacaatcgttggggtagctgtttcgttaggtatgggtgctctacaaattaatggtggtttacattacttgttcaatgttccaaacaatacgtttgtacaagcgattatcatcattgttgttactatcttatttatagcaagtgcatggtctggattaagtaaaggtattcaatacttaagtaacttgaacattggtttaggtactattttaatggtagctgctttaattgttggaccaactgttcttattttaaatatgttaactagctctacgggtagtttactaaacacattcttgtttaatagttttgatacagctgctttaaatcctcaaaagcgtgaatggatgtcttcatggacactttattattggggttggtggttaagttggagcccattcgttggagtgtttattgcacgagtttcaaaaggacgatcaattagagagttcatttctggtgtcttgctagttccagcaattgttagttttgtatggtttagtgtctttggtgtattaggcatcgagacaggtaagaaacacaaagaaatttttgatatgactcctgaaacacagctatttggagtgtttaatcatgtgccatttggcattgttttatcgttgattgcattattattaattgcatcattctttattacatctgctgactcagcaacatttgtattaggaatgcaaacaacatttggttcattaaatccatctagtatggtaaaagttgtttggggaatttcacaggccttaatagcatttgtacttttattagctggtggcggtaacggcgctgaagctttaaatgcgattcaaagtgctgcaattataagtgcattcccattctcctttgtcgtcatactcatgatggtaagtttctacaaggatgcgaaccaggaacgtaaattcctaggtttaacattgactccgaataaacaccgcttacaagaatatatcaagagtcaacaagaagattatgaatctgacattcttgaaaagcgtcagtcacgtagaaatatagagaaaaaagataactaataaaatttagtcaagtattttaataacaagtagtttgtcattctagtagctagaacagatatactacttgtttatttttgtggaaaattgagtatattcaaaaggataagaacgagaatttcgttattaaactacgaattctcgatttttttatattttaaaataggtttatttatgacaacttaatagaaaggggtttgacaaagctaaagtgaggtacgacggtataaataaaaattaattatacttttatagataattaactcaggctgggacataaatcaatattctatgctctacgaagttatattggtagtagttgactgaacgaaaatgcgcttgtaacaagcttttttcaattctagtcaggggccccaacacagagaaattggctccccaatttctacaggcaatgcaagttggggcgggccccaacacagaagctgacgaaaagtcagcttacaataatgtgcaagttggggatggacgccaacaaagagaaagtggattcccaatttctacagacaatgcaagttggcggggccccaacacagaaactggcggaaagtctgtttacaataatgtgcaagttggggtgggacgacgaaataaattttacgaaaatatcatttctgtcccactcccatcaaaagaatgacattgaaaagaaattttaaagtttgacgccataattttctttctgctcaatgaaataatacgtttaaaaatcgaattgaatcattcacgaaattgataattattctcaattaataaaaaatacttattacaccttacctgcatgataagttttacttatatactctgattaaaaagtcaaaacctaaattaagcgttttctaagcatgatgagttgtttatcaataaatataataatacaatttaatcaaggcatataaatataaaaatgtatcaagggggatcattaaatggctgcaaattttaaagagcaatcaaaaaaacattttgacttgaatggccaaagttatacttactatgatttaaaagctgtagaagagcaaggtattactaaagttttgaaattaccttattcaattcgtgttttgttagaatctttacttcgtcaagaagatgattttgtaattacagacgatcatattaaagctttaagtcagtttggaaaagatggaaatgaaggcgaggtaccatttaaaccttctcgtgttattttacaagatttcacaggtgtaccagccgtagttgatttagcttctttacgtaaagcaatggatgacgttgggggagatattactaaaattaatccagaagtaccggtggatttagttattgaccactcagttcaagtggatagctatgcaaatccagaagcacttgaacgtaatatgaaattagaatttgaacgtaactatgaacgttatcagtttttaaattgggcaacgaaagcatttgataattacaatgcagttcctcctgcaactggaatagttcaccaagttaacctagaatatttagcaagtgttgtacatgttcgtgatgtagatggtgaaaaaactgcatttccagatacattagttggtactgattcacatacaacaatgataaatggtattggcgtactaggatggggtgttggtggtattgaagctgaagctggaatgcttggacaaccttcttatttcccaattccagaggttattggtgtacgactagtaaattcattaccacaaggcgcaacagcaactgatttagcgttgagagtaactcaagagctacgtaaaaaaggtgttgttggcaaatttgtagagttctttggtccaggtgtacaacatttaccactagcagaccgtgctacaatcgcaaacatggcacctgagtatggagcaacttgcggattcttcccagttgatgatgaatctcttaaatatatgaagttaactggtagatcagacgaacatatcgcgcttgtaaaagaatatttgaaacaaaaccatatgttctttgatgttgaaaaagaagatcctaattatacagatgttatcgaattggatttatcaacagttgaagcatcgctttcaggaccaaaacgtcctcaagatttaattttcttaagtgatatgaaatcatcatttgaaaattctgtaacagctccagcgggcaaccaaggacacggtttagataaaagtgaatttgataagaaagcagaaattaacttcaaagatggatcaaaagctacaatgaaaacaggtgatattgcaatagcagcaattacatcatgtacaaatacatctaacccttatgtaatgttaggtgcaggtttagttgctaaaaaagcagttgaaaaaggcttgaaagttcctgaatacgttaaaacttctctagcaccaggatcaaaagttgttaccggatatttaagagatgctggcttacaaccctatttagatgaattaggcttcaacttggttggttatggatgtacaacttgtattggtaattcaggtcctttattaccagaaattgaaaaagcgattgctgatgaggacctattagtgacatctgtattatctggtaaccgtaactttgaaggtcgtatccatcctcttgttaaagccaattacctagcttcaccacagttagttgttgcttatgcattagctggaacggttgatattgatttacaaaatgaacctattggtaaaggtaatgacggtgaagatgtatatttgaaagatatttggccatcaattaaagaagtttcagataccgttgatagtgttgtaacacctgaattatttattgaagaatataataacgtatacaataacaacgaattatggaatgagattgatgtaactgatcaacctctatatgactttgatcctaattcaacatacattcaaaatccatcattcttccaaggattatctaaagaaccgggtacgattgttccgttaaatggtttacgtgttatgggtaaattcggtgattctgtgacaactgaccacatctctccagcaggtgcaattggtaaagatacgccagctggtaaatatttacaagatcaccaagtgcctattcgtgaatttaattcatatggttcaagacgtggtaatcacgaagtaatggttcgaggtacgtttgctaatatacgtattaaaaaccaattagcgccaggtactgaaggtggttttacaacttattggccaacaaatgaagtaatgcctatctttgatgctgcaatgaaatataaagaagatggtacaggtttagttgtattagctggtaacgattatggtatgggttcatctcgtgactgggcagcaaaaggtacaaacttattaggtgttaaaacggttattgcacaaagttatgaacgtatccatcgttcaaatttagttatgatgggtgtattaccattagagtttaaaaaaggtgaatcagctgattctcttggtctagatggtacagaagaaatttctgttaatattgatgaaaatgttcaaccacatgactacgtcaaagttactgctaagaagcaagatggtgatttggtagaatttgacgctatggttcgttttgactcacttgttgaaatggattactatcgccacggtggtattttacaaatggttttaagaaataaattagcgcaataaaaaataggtatcacagtaaattttttatcggtatttgaggcactttgatagtgctctaaaaatagctctataaactttatgatttaataggtcggttcaaaacctttgtgttcttggccggcctcttcttgtattttatgttagaatgagatataaagttaaactgaaagaaggcttaaaatgatatatagtattacagaaatagaagcgcgttatgctgaaactgataagatgggtgtaatttatcacgggaattatgcaacttggtttgaagttgcgcggttggattatatatcgaagttaggttttagttatgctgatatggaaaaacaaggaatcatttcacctgtgactgacctcaatgtcaattataaaaagtctattttttatccagaaaaagttaaagttaaaacttgggttgaaaaatattcgagattacgttcagtgtataaatatgagatttttaatgaaaaaggtgaacttgcaactacaggttccacagaattgatttgcattaaagaagatacttttaagcctatacggttggatcgttatttcccagattggcatgaagcctatagtaaagtgcaagcgctcaataatgaagggaaaatagtagagataatggatggtattgattctttataagttactataaatgtttggagaggcaatattaataattaatctataaaaaatagccaatacgttaacattaatgtaattagcgtgaagataagataatatatagcaaaaacgaacttgttcatacaacatcagatgtgctaaaccaaagtacaacttgcgaggttcagtacacatcagaatgtgtaaacaagttcgttttattttacttattttttggaataagaaatttcatcttcgtgatcaactacatttacaataatgtggtcatcttcaaagtaccacaaatctttttctgctacgacaacatttaaatcgtcataatgttgttcatagccaatatcaacatcttcctttggttcaactgtaaaagcaggactaaatccttgcttgagttggaattcgccaccatatcttacaaaaaacacgagcactttattattttcaggtaactcaagttcatttttaaaccaagttactgctgcatcagtaagttctatttgcataacaatgacctcctatatttattacagaatgggagtgggccccaattcatattgattgtggaatttcttttcggaattctctgtgttggagcccgccccaacctgcacattattgtaagctgaatttccataagcttctatgttgggacccccgatcagaattgaaaaaacctagttataagcgcatttcattctgtcaactacagctaatataacattgtgtagcctttgacattgatttatgtctcggtctcaaatgttcttgtaaaaaaactaagtatagttgaattttaagttaaaaaaattgtttttgcaaaaataaaataatccatcaactgcaaaaaaatatgcaatgatggactaatgtcaaaaaattgttacatccattttattttaggttcttcgcctctaaaaatccttgcgatattagagcgatgtctaattatcaatatgattgaaactaagaaactaacgactaataaaatatagtcttgaatgataagcgagccaatcacacagcaaattgctgcaacgatacttgctaaagaaacatatttaaaaatcttcaatacaataaagaagataattgcaagtattagtaatagtatcgggttgactcccaagacgacacctgcactagttgcaacagctttgccaccttggaattttaaataaactgggtaaacgtgtccaagtatagcgaataagcctacaattaaaccatttgtaaaaaaagtactaatagggccatctgcgtgaactggtaaccataaagggaagaaaacagttatgaaccctttgaaaatatctagaaatgttaccaagaatcctgcaggacgacctaatactctaaagctattagtagcgccagtattaccactaccaaattgtctaatatcttttttgaaaaataattttccaattacgaatccacttgggaaagcgccgataagataacttagtagtaacatgacgattatcatcataaatattacacatcctttaatatcttaggactattttatcatattcgtttaaattacggctaaaatttttaaaaacggggattaatatatggaattaagctatgaaagttaattgatacttgcattttacgctgatttatataagaataactattgtatagttttaaaaacgaacgtacgtttgcaggaggcgaaatcattggcaatgaataaacaaaataattattcagatgattcaatacaggttttagaggggttagaagcagttcgtaaaagacctggtatgtatattggatcaactgataaacggggattacatcatctagtatatgaaattgtcgataactccgtcgatgaagtattgaatggttacggtaacgaaatagatgtaacaattaataaagatggtagtatttctacagaagataatggacgtggtatgccaacaggtatacataaatcaggtaaaccgacagtcgaagttatctttactgttttacatgcaggaggtaaatttggacaaggcggctataaaacttcaggtggtcttcacggcgttggtgcttcagttgtaaatgcattgagtgaatggcttgaagttgaaatccatcgagatggtaatatatatcatcaaagttttaaaaacggtggttcgccatcttctggtttagtgaaaaaaggtaaaactaagaaaacaggtaccaaagtaacatttaaacctgatgacacaatttttaaagcatctacatcatttaattttgatgttttaagtgaacgactacaagagtctgcgttcttattgaaaaatttaaaaataacgcttaatgatttacgcagtggtaaagagcgtcaagagcattaccattatgaagaaggaatcaaagaatttgttagttatgtcaatgaaggaaaagaagttttgcatgacgtggctacattttcaggtgaagcaaatggtatagaggtagacgtagctttccaatataatgatcaatattcagaaagtattttaagttttgtaaataatgtacgtactaaagatggtggtacacatgaagttggttttaaaacagcaatgacacgtgtatttaatgattatgcacgtcgtattaatgaacttaaaacaaaagataaaaacttagacggtaatgatattcgtgaaggtttaacagctgttgtgtctgtacgtattccagaagaattactacaatttgaaggacaaacgaaatctaaattgggtacttctgaagcaagaagtgctgttgattcagtagttgcagacaaattaccattctatttagaagaaaaaggacaattgtctaaatcacttgtaaaaaaagcgattaaagcacaacaagcaagggaagctgcacgtaaagctcgtgaagatgctcgttcaggtaagaaaaacaagcgtaaagacactttgctatctggtaaattaacacctgcacaaagtaaaaatacagataaaaatgaattgtatttagtcgaaggtgattctgcgggaggttcagcaaaacttggacgagaccgcaaattccaagcgatattaccattacgtggtaaggtaattaatacagagaaagcacgtctggaagatatttttaaaaatgaagaaattaatacaattatccacacaatcggggcaggcgttggtactgactttaaaattgaagatagtaactataatcgtgtaattattatgactgatgctgatactgatggtgcgcatattcaagtgctattgttaacattcttcttcaaatatatgaaaccgcttgttcaagcaggtcgtgtatttattgctttacctccactttataaattggaaaaaggtaaaggcaaaacaaagcgagttgaatacgcttggacagacgaagagcttaataaattacaaaaagaacttggtaagggcttcacgttacaacgttacaaaggtttgggtgagatgaaccctgaacaattatgggaaacgacgatgaacccagacacacgaactttaattcgtgtacaagttgaagatgaagtgcgttcatctaaacgtgtaacaacattaatgggtgacaaagtacaacctagacgtgaatggattgaaaagcatgttgagtttggtatgcaagaggaccaaagtattttagataattctgaagtacaagtacttgaaaatgatcaatttgatgaggaggaaatctagtgagtgaaataattcaagatttatcacttgaagatgttttaggtgatcgctttggaagatatagtaaatatattattcaagagcgtgcattgccagatgttcgtgatggtttaaaaccagtacaacgtcgtattttatacgcaatgtattcaagtggtaatacacacgataaaaatttccgtaaaagtgcgaaaacagtcggtgatgttattggtcaatatcatccacacggagactcctcggtgtacgaagcaatggtccgtttaagtcaagactggaagttacgacatgtcttaatagaaatgcatggtaataatggtagtatcgataatgatccaccagcggcaatgcgttacactgaagctaagttaagcttactagctgaagagttattacgtgatattaataaagagacagtttctttcattccaaactatgatgatacgacactcgaaccaatggtattgccatcaagatttcctaacttactagtgaatggttctacaggtatatctgcaggttacgcgacagatataccaccacataatttagctgaagtgattcaagcaacacttaaatatattgataatccggatattacagtcaatcaattaatgaaatatattaaaggtcctgattttccaactggtggtattattcaaggtattgatggtattaaaaaagcttatgaatcaggtaaaggtagaattatagttcgttctaaagttgaagaagaaactttacgcaatggacgtaaacagttaattattactgaaattccatatgaagtgaacaaaagtagcttagtaaaacgtatcgatgaattacgtgctgacaaaaaagttgatggtatcgttgaagtacgtgatgaaactgatagaactggtttacgaatagcaattgaattgaaaaaagatgtgaacagtgaatcaatcaaaaattatctttataaaaactctgatttacagatttcatataatttcaacatggtcgctattagtgatggtcgtccaaaattgatgggtattcgtcaaattatagatagttatttaaatcatcaaattgaggttgttgcaaatagaacgaagtttgaattagataatgctgaaaaacgcatgcatatcgttgaaggtttgattaaagcgttgtcaattttagataaagtaatcgaattgattcgtagctctaaaaacaagcgcgacgctaaagaaaaccttatcgaagtatacgagttcacagaagaacaggctgaagcaattgtaatgttacagttatatcgtttaacaaacactgacatagttgcgcttgaaggtgaacataaagaacttgaagcattaatcaaacaattacgtcatattcttgataaccatgatgcattattgaatgtcatcaaagaagaattgaatgaaattaaaaagaaattcaaatctgaacgactgtctttaattgaagcagaaattgaagaaattaaaattgacaaagaagttatggtgcctagtgaagaagttattttaagtatgacacgtcatggatatattaaacgtacttctattcgtagctttaatgctagcggtgttgaagatattggtttaaaagatggtgacagtttacttaaacatcaagaagtaaatacgcaagataccgtactagtatttacaaataaaggtcgttatctatttataccggttcataaattagcagatattcgttggaaagaattggggcaacatgtatcacaaatagttcctatcgaagaagatgaagtgattattaatgtctttaatgaaaaggactttaatacagatgcattttatgtttttgcgactcaaaatggcatgattaagaaaagtacagtgcctctatttaaaacaacgcgttttaataaacctttaattgctactaaagttaaagaaaatgatgatttgattagtgttatgcgctttgaaaaagatcaattaattaccatcattacaaataaaggtatgtctttaacttataatacaagtgaactatcagataccggattaagggcagctggtgttaaatcaataaatcttaaagctgaagatttcgttgttatgacagaaggtgtttctgaaaatgatactatattgatggccacacaacgcggctcgttaaaacgtattagttttaaaatcttacaagttgctaaaagagcacaacgtggaataactttattaaaagaattaaagaaaaatccacatcgtatagtagctgcacatgtagtgacaggtgaacatagtcaatatacattatattcaaaatcaaacgaagaacatggtttaattaatgatattcataaatctgaacaatatacaaatggctcattcattgtagatacagatgattttggtgaagtaatagacatgtatattagctaaaaactatatgcaatcacgaaattaaatgataaaatacagtaatgttaaattttgactaaattcaagggatttatattaaatgctgaccaagtacttatcgttaaattagcgatatactttgaccaaactaatataaatctcttgtattgtataagaaatgatgatgtatctctatatttactgaagtttcaattcggtctaattttatagaaggtgcatgattcatgtagaggatgcgaggggtttattttgaaagatttcgatagtttaattcctggatggtttaaagaatttgtccatgttggtaccgatctaatatggtctcaatatttaattggtctattattgacagctggattcttctttacaattagttctaaattcgtccaattacgaatgttgcctgaaatgtttagagctttagtagaacgtccagaaactttagaagatggtaagaagggtatttcgccgttccaagcatttgcgattagtgctggttcaagagttggtactggtaatattgctggtgttgcgactgcgattgttttaggcggtccaggtgcagtattttggatgtgggttattgcatttataggtgcagcgagtgcatttatagaagcgactttggctcaggtttataaagtacatgataaagatggtggattccgtggtggtccagcttactatattactaaaggtttaaatcaaaaatggctaggtatcgtatttgcgattttaattacaattacatttgcatttgtatttaacacagtgcaatctaatacaattgcggagtcgttaaatacgcaatataatattagtccagtaatcacaggtattattttagcaatcgtgacagctattattatatttggtggtgtacgtagtattgctacgttatcttcgttaattgtaccgattatggctatcatttacattggtatggttttagtaatattgctatttaatttagatcaaattgttcctatgataggtacgattattaaaagtgcatttggtatcgaacaagtaactggtggcgctgtaggtgctgctgtgttgcaaggtattaaacgtggtttattctctaatgaagctggtatgggttctgcgccaaatgcagctgctactgctgcagtgccacacccggtcaagcaaggtttaatccaatcattaggtgtgttctttgatacaatgttggtttgtacagcaactgcaatcatgattttattatattcaggattaaaatttggtgataacgcacctcaaggtgttgcagttacccaatcagcacttaatgaacatttaggttctgctggaggtattttcttaacaatagcagttacattattcgccttttcatctgtggtaggtaattactattacggtcaatctaatattgaatttttatcaacaaaccgtgtgatattatttatttttagatgtcttgttgtagtacttgtctttgtcggtgcagttgtaaaaacagaaacagtatggaatacagcagacttatttatgggcttaatggcaattgtaaacattatttccattataggactgtccaatgtagcttttgcattgatgaaagattatcaaaagcagaaaaaagaaggcaagaatcctgtttttaaacctgaaaacttagaaattaacttatttggaattagtgcttggggcgctaacaaatataagaactctgataaataaatatttttaatgtaacgattcattttataaaaatcaaataaaccctgaggttttcaaattaaagcgaaaatctcagggttttaaatttgtactcaataatgatctgtatcattacactagttaatctaagatttgattaaatattaatatagtaagattgagatttatttccttcattggtgtgcaaagactataccattgataagacatattgttggatagatgaatataaatttattttagctttgcacaatttaatagtacgttttagtttgtattgagtattaattcagataatatataaataaatagcattatttgcaaatatgggagtcagatttttttattaaagttattccactttgagaggcatcgaaattaaattaagatatatcatataggataggcgtgtaatagaacacaagtatttaaattattatacttttaagttagacatttccgatatataatcttaataatagaaaaataggtgatgataatgggagaatatattgttactaaaacattgaacaacaatgtcgtagtatgtactaataatgatcaagaagttattttaatcggtaaaggtattggttttaacaaaaaagagggaatggtgttaaacgaccaaactaatacaatagagaaaatttataaattagagagtgagcaacaaaaagcacattataaaagtttagttgaaatcgctgatgataatgtattacaagtaattattgattcgttaaattttatttctaatactgcgatgaatgttgattcaaagcaacttgtagtttcattaacggatcatattatatttgcatataaacgcttaaaacaaaatcaagttattagcaatccatttgttatggaaactatgcagttatatagtgatgcatatcatattgctaaacaggtgattgatcagttaaatgcagcattagatgtacattttcctgaagatgagataggatttattgcattacatattgcatctaacactgaagatttatctatgcatgagatgaccttgatcaataatgttattaaaaaaggtatagatatcattgaatcagaccttgtgacaactgttgataaggaatcattacaataccaacgttttataagacatgtacaatttttaattcgccgattaagaagaaaagaatatatacatgcacaagatgattttgtgtcgatgataaaaaatcactatccgatttgctataatacagcatataaaattttaactatgatacaaaaacaatttgatgttaatatcagtgagtctgaaattatatatttaacattacacattcatcattttgaagaaaggattaatcaatcctaaattaagtgtattacacgggcgtttcgttactgtaaagggcatttgtatggtatcattgatgttagtaattttacataagtggactgtttttatacaacatcttatgaatattttaagtgtggtgaatctataattgaatgaaaatgaaaagaatataagaaagaactttttaaaatttaccgaatcacggtatatgaagtttgttggtgggaatgatttagtcttctcattaatagcactagtattgttgggtattgttatttttattttcaaaaaagtatcatacgtttttgatccttttatcatcgtttttaagacgatagcagcacctatcatcgtctctttaattctattctatctatttaacccaatcgtaaatatgatggagcgttatagaataccaagagttgcaggtatttctattatttatctagctgtagtaggtgttattacgttaattgttaatttattgatacctattattggttcgcaagtagatagtttagttaaaaattcaccgcaatatctagaaaaattaattaattctattgataaaatagcaaataatacgtttttctcttcgtattatagtcaaattaatgattggttaaattctttacctaagaaaataccatctatgttaagtgaatttacagatggttttgggtctaaaattgcaacgtttgcagaaacgattgctaatattggcgttgtgattgtcacaacaccatttgtactattcttcatgcttaaagatggacatcacttcaaagaattttcaacgaatattatgccaccgaaattccgaaaagattttcatgatctacttgaaaaaatgagtgttcaagttggttcatacattcaaggacaaattatcgtttcattctgtatcggtatactgttgtttatcggttattcggttatcgggttgaaatatagcttagtattagctagtattgctgcagttacaagcgttgtaccatatttagggcctacaatagcgatttcaccagctattgtaattgctgctataacttcgccgtggatgctcttaaaattagcagtagtatggactttagtacaatttgttgaagggcacttcatttcaccaaatatcatgggtaaaacacttaagattcatccacttacaatcattttcattttactgtgtgcaggcaaattgcttggtattgtaggcgttattttaggtattccgggatatgctattttaaaagtattagttactcatttattccaattatttaaacgtcgatacaatcgtttctatggtaatgatgtaggtgaatatgatattaaagaaagtaataaaatagttgaataagtaattaaaaataccaatagactatacgtttgttgatatttttatggtgcttataatgttgggtgttcaaatttatgattatcagcacatgtttagcttataaatttttatgaaagtttagccatttataaagcacatgcataatgaaacgagtatttgtgacttgattagtacttctttattatgtcgaaaataaaaacaagtggtattttgatatattaagaagcactcataatcagctgttaattaataatatttttcataagtattgattcatcattttctttatgttaaatatgaatcagtatagataaccatattgttctgtttgagatagaaatattttctatttacttcttaatacagatgtcaatatgacaaaagtgttatataaatcaaaggtaaatgatatgctatttttatggtttatatgatatattttgatttataacagaaataattagaattgatgtgaaaaaatgaatcaggaagttaaaaacaaaatattttcaatcttaaaaattacgtttgctacagctttatttatttttgtagtaatcacgttgtatcgagagttatctgggattaactttaaagatactttggttgaatttagtaaaatcaaccgtatgtcccttgtcttattatttattggtggtggggcatcgcttgttattctctcaatgtatgatgtgattttatctagagctttaaaaatggatatttcattaggaaaagttttaagagtaagttatatcattaatgcattaaatgcgattgtaggatttggtggctttattggtgccggtgtaagagcaatggtttacaaaaactatacgcatgataaaaagaaattggttcactttatttcattaatactgatttcaatgttgacaggtttaagtttgttatcattgttaatcgtattccatgtttttgatgcatcattaattttaaataaaattacgtgggtgagatgggtactttatgctgtgtcgttgttcttaccattatttattatatattcaatggttagaccgcccgataaaaacaatcgttatgtaggcttgtattgtacattagtgtcatgtgtggaatggttagccgctgcagttgtattatacttctgtggtgtcatagttgacgtccatgtctcatttatgtcatttattgcaatattcattattgctgcattatctggattagtcagctttattccaggtggttttggtgccttcgacttagttgttttattaggctttaaaacgttaggtgtacctgaagaaaaagtattattaatgctactactttatcgctttgcgtactatttcgtaccagtgattattgcattaattctttcatcatttgagtttggtacttcagctaagaaatatattgaaggatctaaatatttcattccggctaaagatgtgacatcgtttttaatgtcgtatcaaaaagatattattgctaaaataccatcattatcattggcaattttagtattctttacaagtatgattttctttgtaaataatttgacgattgtatacgatgctttatatgatggcaatcatttaacgtactatcttttattggcaatacatacaagtgcctgtttattacttttacttaatgttgtaggtatttataaacaaagtagacgtgccattatttatgcaatgatttcgattatcttaattattgtcgcgacgttattcacttatgcatcatacattttaataacttggttagttattatcttcgctttacttattgttgctttccgtagagcacgtaggttaaaacgtccaattcgaatgagaaatctagtcgcaatgcttttgttcagcatatttatactctacatcaatcatatatttatagctggaacattttatgctttagatgtttatacaatcgaaatgcatacgtctgtacttaaatattatttctggattaccattttaattatcgcaattattgttggtgcgattgcgtggttattcgattatcaatttagtaaagtgcgtatatcttctaatattgaagagtgcgaagagattattgatcaatatggtgggaattatttaagtcatttaatttatagtggtgataaacagttctttactaatgaaaataaaaatgcatttttaatgtatcgctataaagcaagttcattagtagttcttggcgatccaatcggtgatgaaaatgcctttgatgaattgttagaagcattctataattacgctgagtatttaggctatgatgttatattctatcaagttacagatcaacacatgcctttatatcataatttcggcaaccaatttttcaaattaggtgaagaagcaattattgatttaacgcaattttcaacttcaggtaaaaaacgccgtggatttagagcgactttaaacaaattcgatgaacttaatatttcattcgaaattgttgaaccaccgttttcaacggaatttataaatgaacttcaacatgtaagtgatttgtggctagataatcgtcaggaaatgcatttctctgttggtcaatttaatgaagaatacttatctaaagcgccaattggtgtgatgcgcaatgaaaataatgaagtaattgcattttgtagtttaatgccaacatactttaatgatgctatttcagtcgatttaattagatggttgccagagttagatttaccgttaatggatggattatacttgcacatgttactttggagtaaagagcaaggctatacgaaattcaatatgggtatggcgacgttatcaaatgttggtcaattgcattattcatatttaagagaacgacttgcaggccgtgtctttgaacatttcaacggtctatatcgtttccaaggattacgtcgttataaatctaaatataatccgaattgggaaccacgctttttagtttatcgtaaagataattcgctttgggaatcactttctaaagtaatgcgtgtaatacgtcacaaataattaaaatccaagtgctaagaggtatacagttatgcctgaagcgcttggattttttggtttctataaagaatgatttataaaaaacggtacagataagaatatttaagtttcctatctgtaccgttttttaatattgaaatgagtttaagttaagtcgcctaacttttattatcagtccaatcaggttcatcaagtataaatgttattgcttatttttgtattcttggcgtattttttgttcttctgcatagcgctctggatttttcttataaaaatcttggtgatagtcttcggctttgtaaaattgtgacgctggtaatatttttgttgcaattgccttgtcagcattaatcgtatttttaagctgctcgatataagtctcagcgagttctttttgatgatcattagtgtagaaaatagctgtttgatattgaggaccacggtcttgatattgaccacctgtatctaatgggtcaatgactgagaaaaatatttctaataacttattgtatgagaataatgcaacatcatattgaatttcaacagtttctaaatgaccgctcgtacctgattttacttgttcgtaagtaggattttcaatatgtccgcccatatatccagaagttactttttctatgccgtcaaaggtgtcaaatggtttcgtcatacaccaaaagcaacctccggcaaaataagctgtattaatattcatttttgacatcctttcattagaccttagtacgatttattaagaaatcacttgctttttgaattgtttttatataacgttaatatgtgattattatagtacacaaaaatctatttttgaagatataaggtaggtaaatatggataaagaaactaatgacaacgaatatagacgtcaaagtgaacatcgcacttcggcgcctaagcgaaaaaagaagaagaaaattaggaaattacctatcattcttctgattgttgtaattttacttatcgcattagttgtatatattgtacatagttacaatagcggtgtagaatatgccaagaaacatgcgaaagatgttaaagtacatcaatttaatggaccagtaaaaaatgatggtaaaatttctattcttgtactcggtgcagataaagcacaaggtggacaatcaagaacagattctatcatggttgttcaatatgactttatcaataaaaagatgaaaatgatgtctgtcatgcgtgacatttatgcagatattccaggatatggaaaacacaaaattaattcagcatacgctttaggtggtccagagctacttagaaaaacacttgataaaaatttaggaattaatcctgaatattatgcagtagttgattttactggatttgagaaaatgattgatgaattaatgccagaaggtgtaccaattaatgtcgaaaaagatatgtcgaaaaatattggtgtatctttgaaaaagggtaaccataggttgaatggcaaagaattacttggttatgcaagattccgtcacgaccctgaaggtgacttcggacgcgtgcgacgtcagcaacaagtaatgcaaacattgaaaaaagaaatggttaattttagaacagttgttaaattaccaaaagttgcaggtattttaagaggctatgtgaatacaaacattcctgattcagggattttccaaacaggtttgagttttggtatccgaggtgaaaaagatgttaagtcattgactgtgccaatcaagaactcatacgaagatgtcaatacaaatactgatggtagtgcattacagattaataaaaacacaaataaacaagctattaaagactttttagatgaagattaaaaataaacaaggcgatttctatcatactcagatagaagtcgccttgttcgttttcaaagaattaattggcatgcatcttatgaagaattattgatctgactttcttacgccagccacaccataatggtttggtttcatttcttctataacaacgtgaattgcttgtctatttgcccccgttgttttttctacggcgtcagttacttcgctaactaaattttttaattgttcatccgaacgaccttctaataattttacattgacgattggcatcatccaaacctcctaatcattattaatttgagtatatcatgtaatacttaaaaattcatttgtaaaataatagaacatttgttctaaaatggttgaaatagaacaagtgttcgtatataatggaattcaagtaagggaggaataacagtgtataattatcatttattagaagatagggatgttctatgtattgatcaaaaaagtttttttgcgagtgtttcttgtattgaaaaggggctagatccattagaaacaaagttagctgttgttgcagatactaagcgtcagggttctgtagtattggctgcgacacctaaattaaaagaattaggcatcaagacaggatcgcgattgtttgaaataccacatagaaatgatatttacattatcaatccaagtatgcgtaaatatcttaatgtttcagttgctatttctaagattgcattgcgttatattccacctgaagatttacaccaatatagtattgacgaattttttatggatgttactgatagctatcatagatttagttctacagtacatgcattttgcgaaagacttaaacgtgaaatttatgaagaaacaggcatttattgtactgtgggcattggttctaatatgttattaagtaaaattgctatggatgttgaagctaagcataatcaaaatggtatagctgaatggcgatatcaagatgtaccaacaaaattatggccaattcagcccttgagagatttttggggtattaatcgtcgaacagaagccaaattgaataaaagagggatttttactataggagatttagcaaaatatccatataaatttttaaaaaaagagttcggtattttaggtgttgatatgcatctacatgcgaatgggatagatcagagtaaagtacgtgaaaagcataagattagcaatccatcgatatgcaaaagtcaaatattaatgagagattatcattttgacgaagcaaaagtagtaatgcaagagttaattgaagatgttgctagcagagttcgagcaagaaaaaaagtggcaagaacgatacattttgcctttggctatagtgatgaaggtggtgtacataagcaatatactttgaaagatccaacaaacctagaaaaagatatttataaagtagtaatgcatttcgcagataaattatgtaataaacaagcactatatcgtacgctaagtatatctttgagtcaatttattaatgaggatgagcgacagttaagtctgtttgaagatgaataccaacgcaaacgtgacgaatgtctagctaaaacgatagaccaattacatttgaaatacggcaaaggtattgtgtccaaagcagtatcgtttacagaagcaggtacaaaacatggtagattaggtttaatggctggacataagatgtaatgactatacggtttaaggaatatataactgtgattcgtataaaataagtctctaaagataaatatttcatatatcacaatagatttcacaataatatctaagaatacatggaatttatcaaaagagactcaataattattggatataacaatcaaaatcactcaatgcttgcataccgcgttctcgatcggtaggatttttgaaactaatttttaaagcaccgtatatatcttcgcgtacttctaagattcttaagttgcttatagatatattatgtaaacttaggatataagtcactttgcttatcatacctgattcatccggaatatctacatatagatcatacgcagtatttagtccacctagttgtttagcgggcagtgcgtcacgatacgatttagcttcggcaaaaaaagataacaatttttcagaatcattgctttcaattagtctttctaaatcttgaaactgactttttagctgtcgaatcatttctaaaatatacgttttattactcaaggtgatatctttccacatttgtgcattactactagctatacgagtgatatcacgaaaaccaccagctgcaagtttattgactaaatgatgttcttgactgttcttttgactaacatgaactaaactagatgcaacgatatgaggtaaatgacttacgacgcttgttacgtagtcgtgttcttcagcagtagttacaataaatttagcaagagtaggtgataacagttcttttaacgtgtttgctgcttgctcatttcttggctcattgtagactaaaatataataagcgttttcaaataagtgctttttagcatttagtacaccggatttatgactaccagccattggatgaccactgactaaatgaatattatgctttaataaactgcattcgtgttgctgtatcattgctttagtactaccagtatcagaaacaataacaccaggtttagttgacatatgtataagctcgctaagatatttatttgtgatagcaacaggtgttgcataaataattacatcggcttttttaatagcttcactataatttaaacatttttcattaataataccgattgatttagctttatctaactgagaagtatctgcatcgtatgcaataatattagtattagggttatggtattttatattgctagcaagacttccaccaattaatccaagcccaacaaataaaactgttgtcatataaatcaccttatttcgaaattttcagaataataacattgtaaatgagctgttgacacagtgcaatagtaaataaaaatcgataatagcattaatagataaacggatataaatcatctacaataaagagtatagtaacacaatggcaacggaggggtaaatcaatggaaccaatattagaaatgattaaaacattaacaggtattaatagtccttcaggagacacagaagaagcaattcaatttgtcgaaaaatatgcaaaagacttgggttatcaaacaacactaacaaataaaggtgcgttattaataacagtgccaggcaaaaatgatgaagtacaacgctgtattactgctcatgttgatactttaggtgcaatggttaaagaaattaaagaagatgggcgcttagcaatagaattaattggaggattcacgtataacgcgattgagggtgaatattgccaaattaaaactgatgctggtcaaatatatacaggaaccatttgtctgcatgaaacaagtgttcatgtatatagaaataatcatgaaatacctagagaccaaaagcatatggaaataagaattgatgaagtaactacatcagaagaagatacaaagagtttaggtatttcagtaggtgattttgttagctttgatccacgtacagttatcacgtcatcaggttttattaaatctcgtcatttagatgataaagctagcgtagcgatgatactaaaattactaaagaaattaaaagaagagcaaataatattaccacatacaacgcaattttatatttctaataacgaagaaataggttacggtgcaaatgcatcaattgattcgaaaatcaaagaatatattgcattagatatgggcgcgttgggagacggccaagcatcggatgaatatacagtttctatttgtgccaaagatgcttcaggtccatatcataagcaattgaaatcacacctagttaatctttgcaaaataaataatattccatataaagtagacatatatccatattatggttcagatgcttcagcagctttacatgctggtgcggatatcagacatggtttatttggcgctggcattgaatcatctcatgcaatggaacgaacacatattgattctattaaagcgacagagaaattactatatgcatattgcttatcaccaattgagtaaacaattagtgttgacaaatgtgaacgacctatgtaatataatgaactataaaaataattagaattttctaaagaaatagtagcagatatgaaacgtagcaaatagaaagctaatgggtgatgggaattagcacgccatatcttgtgaattggactttggaaaacaattgaatgagttttgaaagtgaacatgaattatgttaactaaggtggcaccacggtaacgcgtccttacaggtatatgcgttatgtggtgtctttttatttagacaaaatgtagtagttagttaaaggtagcaacagaaagttagtgggtgatgtgaactaacaccgagattaatgaaattgggttttgtctgcaacagaaaaattatatatagtaaagagtgaactatgaatatttcgaatattcggttaatttaggtggtaccacgcgtcagcgtcctttatattgataaggatgctggcgtttttttagaaaggagcgtaaagaatggatgtattctataaaaaaataaaagcaaatgtaacacctgaagttttagcacaacttcattccaagaagatcattttggaaagtacaaatcaacaacaaactaagggtcgctattctatagtgatatttgatatctacggtactttaactttagataacgatgtattatcagtaagcactttaaaagagtcgtatcaaatcactgaaagaccgtatcattatttaacgactaaaataaatgaagactaccataatattcaagatgagcaacttaagccattaccgtttatatctggatatgttgggacgtgtagctttgatttagtaagacatgaatttcctaaattgcaatcaatacaattagaggatcacaagcaacacgatgtacggttatatatggttgaacaagtttatgtatttgaccattacaaagatgagttatatatcatcgcgacgaatcaattttcaaattcaacaaaatcagatcttgagaatcgagttaataagtctatcgaagacttaactaaaatccaaccattcatgcctacacaagattttgattttaaaactaaagaaattcaatcaaacatttctgaagaaagatttatcgaaatgattcagtatttcaaagagaaaataacagaaggggatatgttccaagttgtgccatcaagaatttacaaatatgcgcaccatgccaatcagcatttaaatcaactttcgtttcaactgtatcaaaatttaaaacgacaaaacccaagtccatatatgtattatcttaatatcgataaaccctacattgtcggtagttctcccgaaagtttcgtaagtgtcaaagatcaaattgtaacaactaatcctattgcaggtacgattcaacgtggtgagacgacacaaatagataatgagaatatgaaacaactacttaatgatcctaaagaatgcagtgaacatcgtatgcttgttgatttagggcgtaatgatattcatagagtaagtaaaataggtacctcaaaaattactaaattaatggttattgaaaaatatgaacatgttatgcatatcgtaagtgaagtcacaggtgaaataaatcaaaatttatcgccaatgacagttattgcgaatttattaccaacaggtaccgtttcaggtgcaccaaaattacgtgcaatcgaaagaatttacgaacaatatccacataaacgtggcgtttatagtggtggtgttggatacataaattgtaatcataacttagattttgcattagcaattcgaacgatgatgatagatgagcagtatatcaacgtagaagctggttgtggcgttgtatatgattctattcctgaaaaagaactgaatgaaacgaaattgaaagctaaaagcttattggaggtgagcccatgatcttagttgtagataattatgattcctttacgtataacctagtggatattgttgctcaacatactgacgtcattgttcaataccctgatgatgataatgtgctgaatcaatctgttgatgctgtcattatttcaccaggccctgggcatccattagacgaccaacagttaatgaaaattatctcatcctatcaagataaacccattttaggtatttgcctaggtgctcaagcacttacatgttattacggcggagaagtcattaaaggtaataaggttatgcacggaaaagttgatacttttaatattaaaactgaaaataatagtttgttatacgagggtgtaccagaacaattttcgattatgagataccattcattaataagtaatcctgataattttccagaagaattgaaaattactggacgtaccgaagattgtatacagtcatttgagcataaagaaagaccgcattacggtattcagtaccatcctgaatcatttgctacagattacggcgtgaaaatattaatgaattttattaattctgtaaaaggagggcgatgattatgtcgttactaacaagaataaaaactgaatcgattttacacgaaagtgacattaaggagctaattgaaatacttatttcacctagtattggaacggatataaaatatgaattattaagtaattattcagaacgagaaattcaacaacaagaattaacatacatcgtaagaagtttaattaatacgatgtatccacatcaaccttgttatgaaggtagtatgtgtgtttgtggtacaggtggagataaatcaaatagttttaatatctcgacaaccgttgcattcgttgtggcgagcgctggtgtgaaagtcattaaacatggaaatagaagtattacctcaaattccggtagtacggatttgctgaatcaaatgcgaatttcaacaactagtgtggacgatacgccaaagcagttagatgaaaaaaatctagtattcattggtgcaacggaatcataccccattatgaaatatatgcaaccagttagaaaaatgattggaaaacctactattttaaatcttgttggtccattaattaatccatatcatttatcgtatcaaatggtaggcgtctttgatcctacaaaattaaagctagttgctaaaacgattaaagatttaggtagaaaacgtgcaatcgttttacatggcgcaaatgggatggatgaagcaacattgtctggcgataatttaatatatgaattgactgaagatggagaaatcaaaaactacacattaaatgcgactgattatggtttgaaatatgcgccgaatagcgattttaaaggcggtttacctgaagaaaatttagcaatctcacttaatatcttgaatggtaaagatcagtcaagtcgtcgtgatgttgtcgtactaaatgcaggtttaagcctatatgttgcagagaaagtggataccatcgcagaaggcatagaactcgcaagcactttgattgataatggtgtagctttgaagaaataccatcaaatgagaggtgaataacatgacaattttagaagaaattgttgaatataaacagtcacttttacaaaatggctattaccaagacaaacttagcactttaaaaagtgtgaacattcagaataaaaaatcttttataaacacaattgaacaggaaccaaagttagtaattattgcagaaattaaatcaaagagtcccacagttaatgacttacctgaacgagatttatctcaacaaatttctgattatgaacagtacggtgcaaatgcagtttcaattttaacagatgaaaagtactttggagggagctttgaacgtttacaagaattaacaacaaaaacgacacttccagtattgtgtaaagactttattatagatccgcttcaaattgacgttgctaaacaagctggtgcatctatgattttacttatagttaatatcttatctgataaacaattgagagagttatacgaatacgctacttctcaaagtttagaagtattggtggaagttcatgatcgtgaagaattagaccgtgcctataagattaatcctaaattaatcggtgtaaataatcgtgatttaaaacgttttgttacaaaagtggaacatacaaatattattttagaaaataaacagccgaatcattattatatttcagaaagcggtattcatgatacctctgatgtaagaaaaatcttgcatagtggtatcgatggcttactaataggtgaggcgcttatgcgttgcgacaatctatctgaatttttaccacaactaaaaatgcaaaaggtgaagtcatgatgaaattgaaattttgtggctttacatcaattaaggatgttacagcggccaatcaattacctattgatgcgataggtttcatccattatgaaaaaagtaaaaggcatcaaacaattgcccaaataaaaaagttagcgtctgccgttccagaacatattgatacagtatgcgtcatggtaaatcctgatttaacaacaattgaacacgtattaagtaatacgccaattaacacaatacagttacatggcacagaaactgtagatttaattaagggaattaaaaagaagtatccaaggattaaaatcattaaagctttacctgcagatgaacatataattcaaaatattaataactataaagcattctttgatttatttattatcgacacaccttcagtgtcttatggaggtacgggtcaaacatatgattggactattttgaagcacatcaaagacataccttatttaattgcaggtggaattaactctgaaaacattcgaacagttaatcaacttaaattatcacatttaggttatgacctcgcatcaggtattgaagtagatggacgaaaagatatagaaaaaatgacagcaattgtaaatattgtgaaaggagaaagggaaaatgaataaacaaatacaaacagaagtagatgaattaggtttctttggcgaatatggagggcaatacgtacctgaaacgttaatgccagcaattattgaattaaaaagggcttataaaaaagcaaaagaagatccagagtttcaaagggaactggaatattatttatcagagtatgtagggcgcgagacaccacttacttatgctgcatcatatactgaaagcttaggtggagctaaaatatatttgaaacgtgaggatttaaatcatacaggcgcacataaaattaataatgcattgggacaagcattacttgcgaaacgtatgggcaagaagaagcttgttgctgaaactggtgcaggtcaacatggtgtagctagtgctactgttgctgcattatttgatatggaacttgttgtctttatgggaagcgaagatattaaacgacaacaactcaatgtatttagaatggaattacttggtgcaaaagttgttgctgttgaagatggtcaagggacattatcagatgcagtgaataaagcattgcaatattgggtaagtcatgtagatgatacacattatttattaggttctgcattaggtccagacccattcccaacgattgttagagattttcaaagtgtgattggtaaagaaataaaatcacagatattgaagaaagaaggtcgacttccggatgcaattgtagcatgtatcggtggtggctcaaatgcaatcggtacattttatccatttattaaagatgatgttgcgttatacggtgttgaagccgcaggtcaaggcgaggatactgataaacatgcacttgcaattggcaaaggattacctggcgtattacatggtactaaaatgtatttaattcaagatgaaggcgggcaagtgcaactagcacattctatttcagcaggacttgattatcctggtattgggccagaacattcttattaccacgacattggtagagtaacttttgaaaatgcaagtgatacacaagcaatgaatgctttaatcaactttacaaaacatgaaggtattatacctgcaattgaaagtgcacatgcactgagttatgttgaaagactagcgcctacgatgtcgaaagaagatattattgtagtaactatttctggacgtggcgataaagatatggaaacaattagacaatatatggcagagcgaggtcttgcaaatgactaaattattcataccttatattatgggcaataaagatttgattgaaaatgcaaaaatattaagcgaaaatggtgccgatattattgaaataggtgtgccattctcagatcccgttgctgatggtccagttatcatggaagcaggacaacaagcgattaaacaaggcatcacgatagattttatttttgaacaattagaaaaacatggtaatcaaattaagtgtcagtatgtattaatgacgtattataatattatttgtcattacggtgaacaagcattttttgaaagatgccgagattcaggagtttatggtttaatcattcctgatttaccatacgaattatcacagcgtttaaaacaacaatttagtcactatgatgtcaaaatcatatcgttagttgctatgactacagatgacgaacgtataaaagatatcgtatctcatgcggaaggatttatttatactgtgacgatgaatgcgaccacaggacaaaacggtgcctttcatccagaattaaaacgaaaaatcgaatcaattaaagagatagccaatgtgccagttgtcgcaggatttggtataaggaccccacagcatgttgcggatataaaagcggtcgcagatggtattgttattggtagtgaaatcgttaagcgatttaaagctaacacgcgtgaagaaatcattgaatatttacaatctatcaaacacgccttgaacaattaagattcattgatttaatataaaatagcttaatgctgtttaaaagtcatataaaacggtaaattataaaactgaatagcaactattcaaaagtaatatgggcaaatccaaacgttcatattactttttttgaaattgtatgcaaaaatctaaatattactataaaagtatacgcaattaaagcgtttatgttttagttttaacattaactattgtatacttatttagattagatttattatttttgacatttgcagaggggaaatagaaaaactgcaaatacggaaatgaaattaattaacgagagacaaataggagtaatgataatgaagtttacaaatttaacagctaaagagtttggtgcctttacggatagcatgccatacagtcatttcacgcaaactgttggccactatgagttaaagcttgctgaaggttatgaaacacatttagtgggaataaaaaacaataataacgaggtcattgcagcttgcttacttactgctgtacctgttatgaaagtgttcaagtatttttattcaaatcgcggtccagtaatcgattatgaaaatcaagaactcgtacactttttctttaatgaattatcaaaatatgttaaaaaacatcgttgtctatacctacatatcgatccatatttaccatatcaatacttgaatcatgatggcgagattacaggtaatgctggtaatgattggttctttgataaaatgagtaacttaggatttgaacatactggattccataaagggtttgatcctgtgctacaaattcgttatcactcagtgttagatttaaaagataaaacagcagatgacatcattaaaaatatggatggacttagaaaaagaaacacgaaaaaagttaaaaagaatggtgttaaagtaagatatttatctgaagaagaactaccaatttttagatcatttatggaagatacgtcagaatcaaaagcttttgctgatcgtgatgacaagttttattacaatcgcttaaaatattacaaagaccgtgtgttagtgcctttagcgtatatcaattttgatgaatatattaaagaactaaatgaagagcgtgatattttaaataaagatttaaataaagcattaaaggatattgaaaaacgtcctgaaaacaaaaaagcgcataacaagcgagataacttacaacaacaacttgatgcaaatgagcaaaagattgaagaaggtaaacgtctacaagaagaacatggtaatgaattacctatctctgctggtttcttctttatcaatccatttgaagttgtttattatgctggtggtacatcaaatgcattccgccattttgccggaagttatgcagtgcaatgggaaatgattaattatgcattaaatcatggcattgaccgttataatttctatggtgttagtggtaaatttacagaagatgctgaagatgctggtgtagttaaattcaaaaaaggttacaatgctgaaattattgaatatgttggtgactttattaaaccaattaataaacctgtttacgcagcatataccgcacttaaaaaagttaaagacagaattttttaggaagggaattatcaaaacatgaaatttacagagttaactgttaccgaatttgacaactttgtacaaaatccatcattggaaagtcattatttccaagtaaaagaaaatatagttacccgtgagaatgatggctttgaagtagttttattaggtattaaagacgacaataacaaagtaattgcagcaagccttttctctaaaattcctactatgggaagttatgtttactattcgaatcgtggtccagtaatggatttttcagatttaggattagttgattattatttaaaagagttagataaatatttacagcaacatcaatgtttatatgttaaattagatccgtattggttatatcatctatatgataaagatatcgtgccatttgaaggtcgcgagaaaaatgatgccttagtaaacttgtttaaatcgcatggttacgagcatcatggctttacaactgagtatgatacatcaagccaagtacgatggatgggcgtattaaaccttgaaggtaaaacacctgaaacattgaaaaagacatttgatagtcaacgtaaacgtaatattaataaagcgataaactatggtgttaaagtcagattccttgaacgtgatgagttcaatcttttcctagatttatatcgcgaaactgaagagcgtgctggatttgtttcaaaaacagatgattatttttataactttattgacacatatggagataaagtattagtaccattagcatatattgaccttgatgaatatgtgttaaagttgcaacaggaattgaatgacaaagaaaatcgtcgtgatcaaatgatggcgaaagaaaacaaatcagataaacaaatgaagaaaattgcagaattagataagcaaattgatcatgatcagcatgaattattgaatgcaagtgaattgagcaaaacggacggcccaattctaaaccttgcttctggcgtttattttgcaaatgcatatgaagtgaattatttctctgggggttcatcagaaaagtataatcaatttatgggaccatacatgatgcattggtttatgattaactattgcttcgataatggttatgatcgttataatttctatggtttatcaggtgatttcacagaaaacagtgaagattatggcgtataccgctttaaacgtggatttaatgtacaaatcgaagaattaataggggatttctataaaccaattcataaagtgaaatattggttgttcacaacattggataaattacgtaaaaaattaaagaaatagatgtaaatgatgttagggcttatagttattgatactataggctcttttttatgctttttaataaagcctctaatgatatattaaatgacaagtttaacaagcgattgcaataaatatagatatgcattgcacaatctatttgcaaatgattgagttgagtttacgttttaattcattcaatatgactcaaaacgagtcaatatgtattatattttggtgaataaaccttagcataacaatttatgtctgattttatatgtgtgtgcaagtgcgtgatatcaaatgtcatatttatctgattgtaatttataaaatgcatgagcaatgattgctgtaacaaattctagcaaagtaatcagtttgtagattagaaataaaaatgaagatagatatattatcgatacatagatttaatatgcaccaaaacttgagtattggtttaatgaaacatagcatgaatgtaaatttagtttactgacataaacacgtcacaaacttacggttatataagtccccttatggaattccgtattctagtttacataatatatattataggaagttacatatctaatacaaaaggtgccctacattatcatttacttacatatgctataatcatattattctattgtttggagtgatttgatgaaatttgtatttgatattgatggtacactttgttttaatggtaaatcaattgatccatcaatcattgattcattgttacaattacaacatgctggtcatgaacttatatttgcatctgcacggccgattcgtgatttgttaccagttttaccagaagtctttcatcaacatactttaattggcgcaaatggcgctatgatttcacagcaatcaaagatttcagttatcaagccaattcaagcttatacatatcatcatatcttacgaataatacaaaaatatgaattagattatattatcgatgatgattggaattatgctgctaaattagacgctgagaacgcgatttttgagcgcttagatccacataagctggctagttgtattaatgttgcaaatatcgacacaccaatcaagatcattttattaaatatagacccggcacaaattacaactatattagacgagctaaataaataccatcaagaattggaaatgattcaccattcaaatgagtataacattgatataacagcgcaaaatattaataaatatactgcattacaatatatatttgatgcagatgttaaatatatagcatttggtaatgaccacaatgatattgtcatgttacaacatgctagtagtggctatattataggaccatcagaagcatacacacacgcaatattgaaacttgataaaatcaaacacatcgataataatacacaagctatttgcaaagtcttaaaatcatataaataaaagcacccctatcaaatgataatcattatcaatcgataggggctattttaataaaattcgtcctcgaacatttcttcctcttcatctaatccaaataattctgccatttctccatgttcaattaacatgtttaaatatgcatcgcggagttcttcttcactcatatcattaatcatttctttaagactatcaatccacatatttctgcgtaattgatagtcttcttcaacttcgtttaacatcattatatgtttatttgctgcttctagactagctgtaaagagtaatgcaatcatatgtttacatatcactcgtcttccatcagcatgaggacaattacatttggattttctaggatgttccatatcaatataacaacgatatactttgttgccactgccctttacttcagcctcatgctacgtttctgaaaatgattttaagttaatgacgcattcactttgataataattaaagcctctttctatagaacgaatacttgcaatatcaagtaatcccattaatgatactcctttttattattatttttaaataaagaaaataaaatcgataagtgtctagattaatatacttgattcatctatattttataacaagtctagaattatcgcattcttaaatagctaatatgaaaatgcttgcactaattcttttgtataagggtgtctatcaacattaaataattcctctattgcaaaatcatcgactatcatgccatccttaagaacgataattctattaactaagcgttgtaacacggataaatcatgagaaataacgataaaatgatttaagttcgtaatcgtttgcgcttttaatatattgattacattttgttcagctataacatctaaatttgaagttatctcatcacatattaaaacgcgaggctgtgctaataacgaacgcatgacattaaatctttgtaattgtccgccactcacttcgcttggtaatttagtcaataattgcgcgtttaactcaaaagtagataaatgttgtaataataattgatcctgagcagtattatcagttaggcctctgtaataatataacgcttcttttaatgaggtctcaatcgtccaatcagggttaaagctagttaaagggtgttggaaaatcggtaacacagcattatcacttaagtaaatttctcctttaacaggtttaaacaagccaagaaccaatgaagcgagcgtacttttaccacagccactttcgcctaaaataccaacattttctccatcaggtatagtaatattgatatcttgtagcaccatctgctttttattataaccaaaagtcacatgttttaactcaatcatagtaatccctctttaattgtgttctatatttaattagacgttcagtatacggatgcaaatgctcatacttgaaatgattaatattacctcgttcaatgatttgaccttcttttaaaacataaatgtactgacaatatttcaatacatgacttaagttatgtgtgataataaataatgtttgaccatgttctaatacaatatgctgtaataaatccatcacttgattaccgttcaaagcatccaatgatgcaactggttcgtctgcaatgattaatttaggctccaacatgagaacgcttgctatgtataagcgttcaagttggcccccagaaagttggaaactatatttatttaatatatctttgctttgtaaattaacccacgacaaagccttatcaattttggacaaagcctcttctttactacttttataatgcttacgataaatcgcagttaactgtttacctaatttagtatggtcgttaaaactttctgcataattttgggaaatatagccaattgtatgaccataatattgactcaatctactaacattttctccatcaaattggtacgaatcatacgtgcaccttaaatcaaatggtaaatattcaagtaaggctttagcaatcaaacttttcccagcgccgctctctccaatcaaggcattaatctgttgactaaaaattttcaaatcaatccctttaataagacatttctcacaagtattctttattgttaaattttgtatatcaatgagactcatcatattcacctcgttgtttcagcaatctatctcttagcgcatctccggttaaattaaaaattaaaatagttatagcaatgactgaagcaggtgcaatcaacataattggatgagacgaaataaaatcacgaccttgttgcaacatagcgccccactctggtgttggcggttgtgcacctaacccaataaatgatagtgaacttatatatagaattattttaccgaaatcaacgaccatcaaaacgataatagccggtataattttaggtgttaaatgacgtattaatattgttcttgtaggtacatgaaataattgtgccatttttatataaggcttattcatttcgctattaactatacttctagtcaatcttgtgtaattcatccattttattactgtaattgagataactaaattccataaagatggttgaaaaaagcttgctaaagcaatcatgatgataaattctggaatacttagaccaacatcaataaaccttaacactaatcgttcaatccacccttttttatatccggcaaatagacctagtgtaacacctatgacaacgatagctattaatgttaaaacagtaacaaacaatgttgaacgtgcaccgataataattcgggtaaataaatctctcccataatcatcagttcctaataaatgcaaccaactaataggttcaaaagtttgtgataaattgactttggttgcattttcactactgacaaagaattgtagtacaatcatcacaaatataaatgcgccgaatacaaaaaagataaggttattctttgaaaatattttatgcatgacggtcactactttctgatatcaatggtgtattggttttgttttttggatttcctaattgtaaacgctgcttcggatcaagtaataacgttaataaatcagcaatcgtattgataataacaacgaagaagccaataaataacacgcatccttgaataacaggataatctcgagatttaatactatccattaatagataaccaataccaggtatatcaaataaattttcaatcactacagtaccacctattagactgccaagtgaaatccctagtaatgggataatcggcaaaattgttggttttagtaaatcatgaattaaaatataacattcattcataccgcgtaatcttgatgcttgtacgatattactttgcaataacatcaataaattagaacgcactaaacgaatgatgtatgcacacatacctaaagatagcgtgagtacaggtaatataaactgacttagtataacgctatctatattcattaaatttgtgacaataaataataaaataataccgataaagaacgctggtaaactaattgatagagttgagatcactctaatcactttatccgtccacttatgaaatcgtttggctgctataatgccgagcggtatagatatgcataacgacactactaatgttgaaaaagatatgagtaatgttatgggtgcatagttgaataatatctgtgttaccggttcttttgattcaaaactttttcctaaattaaaatgtaataaatgattcatccaatgccaccactgtaccaataaagaatcatttaatcccaatttttctttggttgcatttatttgttccgtcgacacttgtgctacatcaagatgtaatattttatcaacaggattgcctggtgataatttcattaaaatgaatgtaagtgtagaaataacaaataaaacaactatcatttgtatcagtctatacaacatagactttattatgaacataatagtccccctccttgtgtaagttactaacactttctttttacatgagaatggcgcatgtatatgcaacttacatattaagaactaacgttcattatagtattatccaaaaagaaattgaagtatatttaattttttaacaaaatcattataaaatataatattttgaatcaagtcaaccatgtaaaatataaaaaaagtcaaaacaaaaacaactatagcactgtattccaccactttcgaaataattgttactgcagtgtaacttaaaagtcgatgattttgtgcatatagttgtcgaatattattttttatctttacggcgaagttcagcgccctcataaccgtatttttcaatttgcttttctaatttacgcgcttttctttctttacgccaatttctagtaaaataccataatagaaaactaattaataaactcatgatcgctaaaaatgcagcgtatcctaataatggttgatattttatatcttgaaaatttggaataaaaaatgcaagcacacctaatataacaaatgtaattactgctgatacaaaccatttatttaaaactaagcaacagaatattgttaataaaatcattattaatgttgtgatccataaataattaggcatatcgaataatgtcatattcattctccttttatttcattactttccttgtatacattttattataaatttttaaaaacttaaacaatagcagtcagtttcaagcaatattcaatctactattagaaaaatcattgttctttgcggcatggaaatcgtaacattatcgtttaggagacgaaattatgtataatgaatgtattataccaaaggagtgattatatgtctcaaggtttacctttaagagaagatgttcctgtttcagaaacatgggatttaacagacttatttaaagatgatcaacaatattatgaaagcatcgatgcactagtacaacaagcaaatcaatttcatcatacatatgcaacaacattaaattcaatcgaacaaattaatactgctttagctgaattagaaaatattttaattgccttagatcgcttaagtaattatgcagaactacgtttaagtgtagatactagtaatattgaggcacaagtattgagcgctaaattatctactacatacggaaaaattgttagccgattatcatttgtagagtcagaaatacttgaattaccagaagaaatacttcaacaattagaagaatcatgtccatatcaacactatattaaacagttaattaaacaaaagccattccaattatctgcgtcggtagaacaagtattagcaactttatcacctacgctaaatagtccttacgatttatacggcacgacaaaaatgctagatattacattcgattcatttgaacatgatggtacaacgtaccctgtcgactatgctacgtttgaaaatgattatgaagataataaagatcctgagtttagacgtaaaagtttcaaatcgtttagcgatgggattcgaaaatatcagcatactaccgcggctacatataatatgcaagtacaacaagaaaaaattgaagctgatttacgtggatttgaatcagttatcgattatttattacatagtcaagaagtaacgcgtgatatgtttgaccgtcaaatcgatatgattatgcgtgacttggcaccagttatgcagaaatatgctaaacttttacaacgtattcacggattagataacatgcgttttgaagacttgaagatttctgtagaccctgattatgaaccagagatttcaattgaagactcaaaaaattatattttcggtgcgttaagtgttttaggtgatgactatacaaacatgttacgtgaagcatacgatcagcgatggattgattttgcacaaaataaaggtaaagatacaggcgcattttgtgcaagtccatactttacacattcatatgtgtttatttcttggactggtaaaatggctgaagcatttgtcttagcacatgaattaggtcatgcaggtcattttacattagctcaaaaacatcaaccatatcttgaatcagaagcatcaatgtactttgttgaagccccttctacaatgaatgaaatgttgatggccaattatttatttaacacaagtgataatccaagatttaagcgttgggttattggctcaattttatctagaacatattatcataatatggttacccatttattagaagctgcttatcaacgtgaagtgtatcacaaagtagatcaaggtgaatctttaaatgcgccgacattaaatgaaataatgctaaatgtttataaacaatttttcggagatgcagtagacatgactgagggtgctgaattaacatggatgcgtcaacctcattactatatgggattatattcgtatacgtattctgctggtttaacaatcggaactgtcgtttctcaaaagattaaaaatgaaggccaaccagctgttgatgcttggttagaaacattgaaaaaaggtggcagtgtatcacctgtcgaacttgcaaacattgcgggtgtagacattactacagaacagccacttaaatctacaattcagtatatttctgatttagtggatgaagttgaaaaattaacagatgaaattgagcaagcaaataactaagatgcgagacaatttatagtagaacaatataaaccaacaggctgggacataaatccctaaaaaacagcagtaagataattttcaattagaaaatatcttactgctgttctctatttatacaatacttcgtattgaatggcttcgctatgcccgtctggcacataattgtaaaattctataaatagaatttttgatgacgggtcccttcctagggtgccgtctcagccaccccaaccggcacattgctgtaagctgactatatgtcagcttctgtgttggggcccctgtcttcgactggcactgctccctcaggagtctcgccattaatactacgtattaacatgtaattttacttttaaatactttaaaagaataagatactttgcccaacttgcacataaatgtaaaattcaataaaatgaattttctgtgttgggtcccttcgtataatttaataaataccactaaactaaattaacgaggtgccttatgtataaaatttataacatgactcaacttacactaccaatagaaacttctgttagaattcctcaaaatgacatttcgcgatatgttaatgaaattgttgaaacgatacctgaaagcgaattcgatgaattcagacatcatcgtggcgcaacatcctatcatccaaaaatgatgttaaaaattatcttatatgcatacactcaatctgtattttctggtcgtagaatagagaaattacttcatgacagtattcgaatgatgtggttagctcaaaatcaaacaccttcttataaaactattaatcgttttagagtaaatcctaatactgatgcattaattgaatctttatttatccagtttcatagtcaatgtttaaagcaaaatcttattgatgataattcaatttttatcgatggtacaaaagtagaagctagtgccaataggtatacatttgtgtggaagaaaagtattcaaaatcacgaattgaaattgaatgaaaattcaaaagcattatatcgtgacttagttgaagaaaaaataatactagagattaaagaagatggagatagcgatttaacaacagaagaaattgatttagttggtagtcatttagataaagaaatcgaagatttaaatcattctattgagaacgaaaactgtactcaaagaggaataaataaagttaaacgagagctaggttttgtattaatggcacttaatataaggaaaatagcagctcaacgagctgtacattataaaatacatatcaaaaaagctgatttctatcaaataattaatagaaatcagcttttttacattgcctaagaacttaatgtcccaagctcttggtttttttgagggtttatgaataatagaaatatatatttatcgtaagggattttatagtaataactttaagttattgttcgtaatgtgtacctgttaaataaaaataaacactttcagcgatgttaataatatgatcaccaatacgttctaaatgtcttgctgctaaatgagcttgtgcagcgacaaatggatcgttatcaataagatacgttgcgttaataatatgactatataagtcatcgatatcttcatcacgctcaattatttctcttattaatacggtatctttctttttaaatgcttgatctaaatcctttaacattaacatagctagtttacccattgtctttaaacgggttaacacataatcatctgtaatcttcgtacgcaatcgaatattggcaatactcgctgcattatcaccgatacgctctaaatcggaggcgatttttaatgaagaaatcatcatacgcaaatcactcgcaatgggctgttgctttgtaattaacatgataactcgctcattaatattataatttagttgattgatatgtttatcgtttttaactgtttgtcgtgcaaagcctctatcgtcaatacttaatgattttataccattttcaatactcacatagacatttgcacctaaccgacgtaattcttttattaaatcatcaagttgctcctgatatcgttgtctaattattgccattatatatcaaccaaaccttcctgaaatataatcttctgtctttttattagatggattagagaaaattttatctgtatcatcgtattcattgacatatccatttaagaaaaatgcagttttatctgatacacgagcagcttgttgcatattatgtgtaaccataataatcgtatagttttcttttaattcttgaaccaactcttctactcttaatgttgagattggatctaatgctgatgtgggttcatccattaaaatgacttcaggttcaattgctaaacaacgcgcgatacaaacacgctgttgttgcccaccggataaactatatgcatttgtgtgcaacctatcctttaattcatcccaaattgcagcgccacgtaatgatttctcaacgatttcatcaagaacttttttatttttaataccgtgaatctttggcccgtaagtaatattatcgtatattgattttggaaatggattaggttgttgaaagaccatgcccacatttgtacgtaattgttctttagaatatttttgatcaaaaatgtcttgatcgcgatataatattttaccagctgttttgactgtgggtactaactcaaccattcgattcaaagttttaatatatgttgatttaccacaaccagatggacctataatggcagtgatttggttttcataaatatctaaattaatattttgcaatgcatgattttcgccataccataagtctaaattttgtgttgaatatataacagaatgtgagtttgtatcatctggtgttttatgatgactttgtgagacatcaaacgtatgactttgagatatttgtttagtttgtgcaagtgtttgcgccatatttaaaactccctttttaatagataaatgagattgattgtttaaattagaattttttactaaatttgttacgtaaaataatcgcaacgccattcattaagattaagataactagtaaaacgataatgcctgccgatgcaacattctggaattcttcttgaggcattttcgcccaagtaaatatttggataggtaatgctgaaaattgatccaatatacttctaggtgttgccaataatatagttggtataccgataagcacaagtggtgctgtttctcccagtgctcttgaaagagacaaaatgaatccagttaaaataccaggtaacgctgctggtaagacaactcgtcttatcgtttgccatttattagcacctaagccgtaagaagcttcgcgtactgaggtaggtacagctctaattgcttcctgacttgaaacaataataattggtaatatcagtaaggtcattgttagcgctgctgccaatatactgttacccattttcaaggcttcaatcccggcaccaccaacgaacaaagtgtaacctaatagcccaaatacaactgatggtacaccagctaaattggaaatactgattttaacaaactgagtaaatttgttgtttttcgcatattcttctaagtatatagctgtacctattcctaggatgattgataatggaatgatacttaacattaaccaaagtgaaccgattaacgcgcctttaacgccagccatagatggtgttgaagaagaaaaattagtaaaaaactgtaaatttaaatgacttacccctttaatcaatgtttgagttaacaacgcaataagtacgacaagtcctaataatgtacatgctaaaaatatgagtttgaacactttatttttaaccgttctggatgataaatgtttttggacaagttgttgatcgacaagtgattgtctattattatctgtcgtttccatattaatactcctccctaaaacgcttagaaatccattgagaaagtaaattcatgattaaggtaaagataaataatgtgaatcctacagcataaatactgtaataaatatttgatccaaatgttgcatcacctgtcgctatctcaacaatatatccagtcattgtttgaattgaacttgttaaacttaatgaagctgttggcgaactccctgccgctaatgatacaatcatcgtttctccaattgctcttgaaatcgcgagaacgattgaagctacaatacctgatgttgctgcaggaagtacgactttagttgctacttctaatttagttgctccaagtccataggcaccttctcgaattttatttggtacagatgccattgcatcctcactcaaacttgtgatgagagggacaatcataataccgacaactaagccgggacttatagcattaaattctccaagacctggtatgaaagatcttaatactggtgtaacaaaggttagtgcaaagaaaccaaacacaattgttggtattcctgctaaaatttctaatatcggtttaattatgcgtcgtgcacggtcacttgcatattcacttaaataaattgctgcaccaagcccgactggaactgcaaatatagtcgcaataactgtgatttttaaagtccctattatcaatgcccagataccaaacttagggtctgaaccggtaggattccaagtagtagaaaatagaaattcagttattggaattctggtgaaaaaagtgatggtttctaaaagcaatgtgattaatatacctagtgttgttaaaatggaaatcgctgaaattgcggctaaaataactggtataattttgtcattatgcttcccttttttattattatttttttcaattaaagctttaacattagtagatgaagtcataatcaaacctctttctattactcccaaaataattagatttgtaaaataatgatgaaccactattttaagttgataagcttgtagactaactgaatgtcaaaatcagcgtctcgataaatcaagctttgtactctaaataatgattcaccatcaaaatcatgtttcaagacacatttgaaattgcgtcttattattttttgtctttcagactttttatcatcagatttcttgtcgtctgatttttgatttttatcaataaatgcttttaaatcatctagttgtgatttgtatgttttctctggtgctgctacatatccagcttcttcagctgctttacctttatcttctaagacgaatttgataaattctgacattactttattatcttttaatgctttttcatttacataaatgaataatggtctacttaatgcataagagttatcttgaattgtttttttcgtaggctctgttgctttaccattttcatctttgattttaacttcttttaatttatctttattttgtacgtagaagttatatccaaagtatccgattccctctttgtttttcgttacagaagaaacgatagcatttgtatcagcatttttttctgctttaatatcttctttattcattacttcattttcaaagaagtcataagtaccatgacttgagtttggtgatacagcatttatttttttatctggccatttactattaacatctttccatgttttagcttttccagaataaattgcttttaattgctgtttgtctaattcatctacaaaatcattttctttatttacagcaaccgttacaccatcttgcgcaattttgaattctttgtatttgatattcttattttgtaatttttgcttctcttcatctttaattggtctactagcatcagcgaagtcgatatctcctgcaatgaatttttggaaaccagcacctgtaccagcttgtcctgctgagattttagcatccgagtgatcttgagcccatttttcatttaatttctccacaattggtgctactgttgatgagccatcacctttagcttccccttttaaatcactattaccactgccaccattaccgccaccacaagcacctaataatagtgttgcacctaaagctgtagtaccaacaaattgccattttttcattgaaatatcctccctgtatgaacaacaaatagtatttgtattgattacatctttatcttaaccttgaattattaacctcatttttagaaactgtaaatgttacataaaaatttgttaagaaaatgtaaatattaatttttgttaatctaaaaaatattgcttcattagtaaaattaaattgcttcctgaaaaattatcgaaatttaaatatgtacacaaaaaatgaggctgggacataaatccctaaaaaaacagcagtaagataattttcaattagaaaatatcttactgctgttctctatttatacaatacttcgtattgaatggcttcgctatgcccatctggcacattactgtaaaattctataaatagaatttttgatgatgggtcacttcctagggtgccgtctcagcctcggtcttcgactggcactgctccttcaggagtctcgccattaatactacgtattaacatgtaattttactttgaaatacattaaagcccaaattaatcaaaagctttctgaaccagaaacgaaaaaaatctatagtcatagaaaaatttatgtagagcctgtttttggatttatgaaggttattttgggtttcactcgaatgtcagttcgaggaataaataaagttaaacgagagctaggttttgtattaatggcacttaatataaggaaaatagcagctcaacgagctgtacattataaaatacatatcaaaaaagctaatttccatcaaataattaatagaaatcagcttttttacattgcctaagaacttaatgtcccagcctattcgtttgaattatttaattttttactttgaaaggaatgtttaaaaaactacttcatctgtccgatttaatattgaatataaaaaacacgcatcctacgatacgtgtaaaaatgattattcttttgagtcaattcgactccaaccttttttagttaaagtgattttaccagtttctatattaataatcttctgtttatataagtgaccgattgcacgtttgaatgaacctttactcatattgaatacttctttaatcgcttcagggcttgatttgtcccagaatggtaattcaccatcatattcaactagtaaatcaaagatgacttgaccgtcatcgtctaaacgttcatgtgcaagtggtaaaaatgaaccatttaactcacctttatcattatgcccgataattctaacttgaacagattcacctagtctcggttcagctttacgttctgattcatgtacgaatattttgtaacctgattcgcttaataagaagctaccaattcgtaatacgcggtaaggtttggcttcaatgacttcgttttttaaattatcgtcgtgtacaggtgtaaacatattttctacaacagattcactcgctaaacgtccatacatatgattctcacggtcaattcgtaatgtaactagcaaatgatcacctggttgtggccatagtgatttcacttttggtaaatcttcccatggtactaacacttcacgaggtaatccaacatctatacgtgccccatcgcgatccgttttaagtactttagcaaaatcatatttatctttcgtaatatcaggcatattttgagttgcaaataattcacctgaacggtttggataaatgaagaaactatattcttcacctacttctaattcatcatcatcgttcatttctgattggtttaactttacgttttcaccgtttggtccttttaaaaggtaagttgagccttgtaaccctactacttcaaggaattctatagaacctactatatctttgtctaatgccatgttattctccttcgattcttgtattctttattattataacatgtgtgagtcattctatcattacaacttatatgaggtcgaaactgtgacgataatatgatataattcttccgttagaatatcgaatgaaaaaaaggagaaaatgcatgttacaagtaactgatgtgagtttacgttttggagatcgtaaactatttgaagatgtaaatattaaatttacagaaggtaattgttatggattaattggtgcgaatggtgcaggtaaatcaacattcttaaaaatattatctggtgaattagattctcaaacaggacatgtttcattaggtaaaaatgaacgtctagctgttttaaaacaggaccactatgcttatgaagatgaacgcgtgcttgatgttgtaattaaaggtcacgaacgtctttatgaggttatgaaagaaaaagatgaaatctatatgaagccagatttcagtgatgaagatggtatccgtgctgctgaacttgaaggtgaatttgcagaaatgaatggttggaatgctgaagctgatgcagctaaccttttatccggtttaggtatcgatccaactttacacgataaaaaaatggctgaattagaaaacaaccaaaaaattaaagtattattggcacaaagtttattcggtgaaccagacgtactattactggatgagcctactaacggtctggatattccagcaatcagttggttagaagatttcttaattaactttgataatactgttatcgtagtatcacatgaccgtcatttcttaaataatgtatgtactcatatcgctgatttagactttggtaaaattaaagtttatgttggtaactatgatttttggtatcaatctagtcagttagcacaaaagatggctcaagaacaaaacaagaaaaaagaagaaaaaatgaaagagttacaggactttattgctcgtttctcagctaacgcttctaaatctaaacaagcaacaagtcgtaaaaaacaacttgagaaaattgaattagatgatattcaaccatcatcaagaagatatcctttcgttaaattcacgcctgagcgtgagattggtaacgacttattaatcgttcaaaatctttctaaaacaattgatggcgaaaaagtattagataatgtatcattcacaatgaatccaaatgataaagcgattttaattgatgatagtgaaattgcaaaaacaacattacttaaaatattagctggcgaaatggaaccagacgaaggttcatttaaatggggtgtgactacatcattaagttacttccctaaagataactcagagttctttgagggtgtaaatatgaatctcgttgattggttaagacaatatgctcctgaagatgaacaaacagaaacatttttacgtggtttcttaggtcgtatgttatttagtggtgaagaagttaagaaaaaagctagtgtgctttcaggtggagaaaaagtacgttgtatgctaagtaaaatgatgttatcaagtgcgaatgtacttttacttgacgaacctactaaccacttagacttagaaagtattactgctgtcaatgatggtcttaaatcatttaaaggttctatcatctttacttcttatgacttcgaatttatcaacacgattgcaaaccgtgttatcgatttaaataaacaaggcggcgtttcaaaagaaattccatatgaagaatacttgcaagaaatcggcgttttaaaataaacataatatgtagaatttcttttcgaaaatctctgtgttgaggcccggccaacttgcacatttttgtaagttgacttactgtaaccttctatattgggacttattccccaactcgtattgtttgtagaaattaggaatccaatttctctatgcgtggcgccgacaaggattgaaaaaagctagctacaaagtcattttcattcagtcaactactgtcaatataacattgcagggcctagggcattgattcatgtccgagactatattcaatttaatagacattaactgggcgtctcgatgctaatatttatagcatcgaggtgtcctttttattttattttttaacacatcagcacagtgaacaccccttctataaattacaaattcagttatcaacgcaataaaagaatacatttatttaatgtgcatattgagtatgctataagtattttggattttatttttcaaaaagtctcattatcacaccttttataatataagcaacgctataacttgaattttcaggttattccaaaaaatctaaattatcggtttacattcatatttgtcatatgtataatgaacacataccaatttaataatattttgatgaggcgcatcaatcatgagtaaagtttagattactgtctgctaacagctaaatttgaaagggtgcgatgccgaagcgattataatagcagttataatttgttggactttttggttaagagctgagagtttgtcattatttaaaaataatggagtgcatcacttgtatatagattaagaacaagttcgcattccgaacttgttctttttttattattgtgtgcccttcctaacaattaggaggattatatggtaacaagaagtgtgttgaaatttggcggatcatccgtcagtgattttacaaaaataaaaaggatcgctgaaatgttaaaggagcgagtcaatcaagatgaacaattaattgtcgttgtaagtgctatgggtaacacaatagatcaattaatgacgaatgtatcgaccttgactaaagcaccaaaacaacaagaactggcattattattgacaaccggagagcaacaaactgtatcttatttatcaatggtattaaatgatatcggtgtgaatgccaaagcaatgactggctatcaagcgggtattaaaaccattggccatcatttaaaaagtaaaattgctcaaattaatcctcaaacatttgaacaagcctttcaagaaaacgatattttagtagttgctggatttcaaggcatcaatgaacatcaggaattaacaactttaggcagaggcggttctgatacgaccgctgtggcacttgctgttagtaatcaaataccttgtgaaatttataccgacgttgatggtgtgtatgccactgacccaagacttttaccaaaggctaaacgactagacatcgtctcatatgaagaaatgatggaaatgagcgctttaggtgctggtgtacttgaaacaagaagtgttgaattagctaaaaactataatatccctttatatttaggaaaaactttatcgaacgtgaaaggaacatggattatgtcaaatgaagaaatattagagaaaaaagcagttactggtgtggctttggataaacatatgatgcatctaacaattagttatcccctatctgacaatcagctacttacccaactatttacggaacttgaagaaggtgctgtaaatgttgatatgatttcacaaatcgtcaacttggatgggctacaactatccttcacgattaaagatagtgattttcatcaaatttctatgattcttgaaacattaaagaatcaatatgaagcattagcttataaaatcaatgagcattatgtcaaaatttcattaattggctcaggcatgcgtgatatgtcaggtgtggcatcaaaagcatttttgacattaattgaaaataatatacctttctaccaaacaacaacatctgaaataagtatttcatacgtcattgatgattttaatgggcaacaagcggtagaaaaactatatgacgcatttaacatttaatggtaaaatgattgttaaaatattctaaaaattggaaattattataaaatggagtgacaagttatgacaaagttagcagttgtgggtgcaacaggattagtaggcacaaaaatgttggagacattaaatcgtaaaaatattcctttcgatgaattagtattattttcatcagcacgttctgcagggcaagaagttgaatttcaagaaaaaacatatacagtacaagaattaactgatgctcgtgcaagtgaacatttcgattatgtattaatgagtgctggtggcggtacaagcgaacactttgccccactctttgaaaaagctggtgcaatcgttatagacaattcaagtcaatggcgtatggcagaagatattgatttaatcgttccggaagtcaatgaacctacatttacaagaggtatcattgccaatccaaactgctctacgattcaatctgttgtgccattaaaagtattgcaagatgcttatggtttaaaacgagtggcatatacaacatatcaagctgtatcaggttcagggatgaaaggtaagaaagatttagctgaaggtgtaaatggtaaagcaccagaagcatatccacatccaatttataataatgtgttaccgcatattgatgtgtttttagaaaacggatatacaaaagaagaacaaaaaatgattgatgagacgagaaaaattttaaatgcgccagacttaaaagtaacagcaacatgcgcacgtgtgcctgttcaagatagtcatagtgttgaaattgatgtaacgcttgacaaagaaacgacagcagaagatattaaagcgttatttgatcaagatgaccgcgttgttttagtagacaatccagagaacaatgaatatccaatggcaatcaattccactaataaagatgaagtatttgttggccgtatacgtagagatgattcattagaaaatactttccatgtatggtgtacatcagacaatttattaaaaggtgctgcattaaatgctgtacaagtattggaacaagttatgcgtttaaaaggagcgaattaaaatgacacatttatttgagggtgttggcgttgcacttacaaccccttttacaaataacaaagttaatcttgaagctttgaaagcacacgttaattttttactagaaaataatgccaaagcaatcatcgtaaatggaactactgctgagagccctactttaacaacagatgaaaaagaactcattctaaaaacagttattgatcttgtagataaacgtgttcctgtcatagcaggaactggaactaatgatactgaaaagtcaatccaatcttcaatccaagctaaagccttaggggctgatgcaattatgttaattacgccctactacaacaaaacgaatcaacgtggtttagtaaaacattttgaagcgattgcagatgctgtgaaattaccagtcgtgctatacaatgtgccatcaagaacaaatatgactattgaaccagaaactgtagaaatattaagtcaacatccttctattgtagctttaaaagatgctacgaatgattttgagtatttagaagaagtgaaaaagcgaattgatacaaattcatttgcattatatagtggcaatgatgacaacgtcgtcgaatactatcaacgtggcggtcaaggggttatctctgttattgccaatgtcattcctaaagaatttcaagcgttattcgatgctcaacaaagtggattagatattcaagatcaatttaaaccaatcggcacactgttatcagccctatcagttgatattaacccaattcctattaaagctttaacaagttatttaggatttggaaactatgaattacgtttaccattggttagcctagaagatacagatactaaagtgcttcgtgaagcatatgacacatttaaagcgggtgaaaatgagtgaaaatattactaattggctatggtgcaatgaatcaacgcgttgctagattagcagaagaaaaaggacatgaaatcgttggggtcattgaaaatacatcgaaagcaacaacgccatatcaacaataccaacatattgctgatgttaaagatgccgatgttgcaatagatttttcaaatccaaatctgcttttccctttattagatgaagcgtttcatttgccattagtcgtggcaacaactggtgagaaagaaaaactacttaataagttagatgaattgagtaaaaatatgcctgtatttttcagcgcgaacatgagttatggcgttcatgcactgactaaaattttagcagctgctgttcccctacttgatgatttcgacatcgaattgactgaggcacatcataataaaaaagtagatgcaccaagtggtacgttagaaaaattatatgacgtgattgtatctttgaaagaaaatgtaactcctgtttatgatagacatgaattaaatgaaaaacgccagccacaagatattggtattcattctattcgtggaggtacgattgtcggtgaacatgaagttctatttgccggcactgatgaaacgattcaaatcacgcatcgtgcacaatcaaaagatatttttgcgaatggtgcaatacaagcagcagaacgcttagttaataaaccaaacggcttttatacgtttgacaacctataaacatattaaaggagatcgattattttatggtacaacatttaacagctgaagaaattattcaatatataagtgatgctaaaaagtctacaccaattaaagtatatttaaatggcaattttgaaggcatcacatatccagaaagttttaaagtatttggttcagaacaatctaaagtaatcttttgtgaagcagatgattggaaacctttttacgaagcatatggtagtcaattcgaagatatagaaattgaaatggatcgtcgcaattctgccattccattaaaagacttaacaaatactaatgcacgtattgaaccaggtgcatttattagagaacaagctattattgaagatggtgctgtcgttatgatgggtgcaacaattaatattggcgcagtcgttggcgaaggtacgatgattgatatgaatgctactctcggtggtcgtgctacaactggtaaaaatgtacatgtaggggctggcgcagtattagcaggtgtgattgaaccccctagtgcttcaccagttataatcgaggatgatgtattaatcggtgcaaatgcagttattttagaaggtgtacgtgtcggtaaaggtgctattgttgcagctggcgcgattgtgacacaagatgtaccagctggtgcagttgttgctggtacacctgctaaagtgattaagcaagcttctgaagtacaagatactaaaaaagagattgtagcagcattaagaaaactaaatgactagtgacgtcaacgtataataatttcaaggttgagatacgattatgtctcaaccttattgtttatcattaaataaacttatgatcacaagtttcgaaatacgttacactgtttatatagtaatttaacacaaaggattgataattatgaatgaattagaatttgttacgaaacatcgccgtcatttacatcaacatcctgaattaagcttacatgaatttgaaacaactgcttatattaaagcgtttttagatagtttaaatattaaatacgattgcccattagaaactggcgtcgttgcatacttagaaggtaacggctcacatacgatagcgtatagagctgatattgatgcgttacctattttagaggaaaatgatgtaccttatcgcagtcaatctgatcatgtgatgcatgcttgtggacatgatggtcatacaactgcattaatgcttttcgtacaacgttgcaaagacatgcaagatgcggggcaattaccgcaaaatgtcgttttcattttccaacctgcagaagaaactggtggcggtgcaaatcgattaataaaagccggtgcctttgataagtatccaattgaagcggtatttggtattcacgttaacccatttgctgatgaaggcattgcagtgataagagatgaagaaattacggccagcgcaacagagtatcgctttttcttaacaggcctgtcaagtcatgttgctgataaagaacaaggtcattcttgtggtgaagcattacaacatgtattaactcaaatatcacaaattcaacaatttcaccttaacggtttgaaacgaaatattgttcatattggtcattttaaagctggtgaagcgattaacactgtaccaagtaatggttatttagaaggtacaattcgtacatatgatattgatgatttaacaatcgttaaaaatcaaatgcaaaagatagcagaaagtgtcaagcttctgtttaatgtagactgtgaaattaaatttgcagaaggttatccccctacaatcaatagtccgaaattacgtactcaaatagaggacgccttaataaaagctgatttaaatgtctatgacaaaccaacgccattcttatttggggaagattttagtttttatggtcaacaactggctcctgcttactttgtttttataggaacacgaaatgaagataaaggttttgtaactggtttgcacacatcgcatttaaattttgatgaaaaaatgttaataaacgtggctaatttttacgaaaatttattaaataattacaaagaggtgtaatacattgacagcaacatggtctgtaaataagaaaatatttttacaaaatgcaatcacagtcaaaaacaatcagccattaatggcagttgttaaaaataatgcatatcactatgacctagaatttgctgtaactcagtttatccatgcaggtatagatacatttagtacaacatcactacgagaagcaattcaaattagacaacttgctccagatgcaacaatctttttaatgaatgcagtttacgagtttgatttagtccgtgaacatcaaatacacatgactttgccgtcgttgacatattactataaccataaaaatgatttatcaggtattcatgttcacttagaatttgaaaatttattacatcggtctggatttaaagatttaaacgaaattaaagaagtattgaaagatcaccatcataatcaaaatgcaaaaatgattattagtggtttatggacccattttggatatgctgatgaattcgatgtgtcagattataatgttgaacgttcacaatggatggaaattgttgaatcacttttatctgaaggttatcagttcgacttaatccatgctcaaaatagtgcgagtttttatcgggaaggacaaatattactaccccaccatacacatgcgcgtgtaggtattgcgttatacggttcaagaccatatagttcactgaatcaacatgatattgttcagtcattgactgtaaaagcaaatgttattcaagtgcgcgaggtacaagctggtgattattgcggttatagctttgcctttgaagtgactaaaaacaatacaaaattagctgtagttgatatcggttatggcgatggaattttaagaactcgtgctaaacatgaagcacttatcaatggtaaacgctacccgatacgtgcattaatgatgagccatatgtttgttgaagtagatggcaatgtacatgcacaagatgaagttattctttataataatgatatccgcatcgatgaatatacctttaaaggtgttggtgcaaattctgaacaattaagtgctatgaatcatgattctttaaaaaaggagtacatttcaaatgactgttaaatataatcaaaatggcgaattaacaatggatggtattagtttaaaaacaattgcgcaaagctttggtacacctaccattgtttatgatgaactacaaattagagaacagatgcgccgttaccatcgcgcatttaaagatagcggtttaaaatataatatttcatatgcctctaaagcatttacttgtcttcaaatggtcaaactggtagcagaagaagatctacaacttgatgttgtttctgaaggtgaattatatacagctttagaagcaggttttgaaccgagtcggatccatttccatggtaacaataaaacgaaacatgaaattaggtatgctttagaaaataacatcggttattttgttatagattcattagaagaaattgaactaatagaccgctatgctaatgatacggttcaagttgtattacgagttaatccaggtgttgaagcacatacgcacgaatttattcaaactggtcaagaagatagtaagtttggattatcaattcaatatggcttagctataaaagcaattaacaaagtgcaacaatctaaacacttaaaattaaaaggtgtacattgtcatattggttcacagattgaaggtacagaagcatttattgaaactgctaaaattgttttacgttggcttaaagagcaaggcattcaagttgaattattaaaccttggtggtggctttggtattaaatatgttgaaggtgatgaaagtttccctatcgaaagtggtattaaagatattacagacgcaataaaatccgaaattaaagttctaggcatagatgcaccagaaataggtattgaaccgggacgatctattgtaggtgaagctggcgttactttatatgaagttggaaccattaaagaaattccagagattaataaatatgtttcaatcgatggcggtatgagtgatcatatcagaactgcactttatgacgcaaagtatcaagcattgctagttaatagaaatgaagaagcagatgacagtgtaactatagctggaaaattatgtgagtctggtgatatcattattaaagacgctaaattaccttcatcagtcaaacgcggagactatcttgctatattatcaactggtgcatatcattactctatggcatccaattacaaccaaatgcaaaagccttctgtgtttttcttaaaagatggcaaagcacgtgaagttataaagcgacaatcgttaagacaactcattattaatgatacaaaataaaaataaacaaagtaatccccgaagcacagcaaattatactgtgtctcggggaatttttaagattatttaattaagagtttattgcttgttggtttatgaatatggatgaatatttttcattacttcagctacagcaacactacttgcattagattcatcttcaagcttttcaattatgttattataatccttttcattacgattctgactcattttgtatgcagcctctatcttgtgtatcttgactttaaatcctacaatacctttggcctgcattttggtattttcagaaatattgtcccataatactggatcttcacgatgcctttcatactttaccaataggcttttcaagtcatctattgtttcttcctcacttaatatacttgattcaccatataaatgaactgcttgataattccaagtaggtacattttctttttcataccacgctgaagaaacgtaagaatgtgcaccttgatatacgattaatacattttgattatcttttaatgtattacattgaggatttgttttagctagatgcccactaatataatagtcgtccccttttttatctaaaactaatggtacatgcgtagcaataggctttccttgatccacagttacaatcattccaaaagaattactttgaataaacttttcaatttctttaaaatcatctacttgaaaatacttcggcacatgcatatgatctccccctttgaataacaatacatttgaatgtattttatcattaaaaaatctaaggataaataagttagagtaatgtcatagtattactcgtttataaaataaactatgaaacaaaaataattaagctttaacttttagttttaacttgcttttttaaataatataaaatgataaggattaataacaaatataatgtataaaacagaatttcatcaaatccaaaatctttacttgtaattaatacatctatatgttctaattccatcatctctgctttaatataattattaaactttggcagagtcattaaatgtacattataaatataataataaaagtctatgaatatgatgttaaaaaatatgtatgtcttatctaaattagttttaaagaataatatcccagaaatcattatcggaaccactaatacaatcatcattgctgctaaaatattaatatttaaaccaattgcagataatacaccgaaaactaataaattagcaactaaactaaggataagatatttcataaaatcacctcgtcgttgtacaccataattatattatataaatataattttctattgcaaacaatgttggtgatataaaaaaagagttctcaatttggttgagaaactcatcgcgttaagtatttgaaataagcatataaaaacaccttacttcttggtaaggtgttagttaaaatcaatgattcaaatctaagaattatagtttaacaacgtttgcagcttgtggaccgcggtcgccttcaactacttcaaactcaacagcttgaccttcttctaatgatttgtaaccatcttggttaattgctgaaaaatgtacgaatacgtcattttctccttcaacttcgataaagccgaatcctttttcagcgttaaaccatttaactgtaccttgtttcataatctgaaacctccaagactaaaattcattcaatatgcttattcgcatattacaaaaaatacatgcaaatttcactcaaatattctttgcaatatggaataatcatctgcttaacttgtattatagtgcagttattaccaaattgcaatacaataataaaaaatattcatttaatcaattattggtagtttataatatacttcattattttgtaaaacaatgaaactataaaatatttgtaaatcctcttcacaatcttcgcaatagttcatgtcacaattattataaaatgcataaatattatatttgcctgtgacataattatcgaactgaactttacattgattaatcaattgttgatagtgcttaaacatgtcatcaaaatcttgatattgatatttttcaacaatgttttctggccagtcactgaataaccaccatccctcataatcggctctaattttggtaactgtccacattattaaagaccccttccatacttcaaaaactctatacttatttttatacctttatcctctgaaaatcaagtttgacgacttgaaacaaacaaagtattaactatagtaattattagtttttttaagtaaaactacgtataataatattatgaggtggtaaaaatgagacatatacatttacaagtattcggacgcgttcaaggcgtcggatttagatattttacacaacgcattgcaatgaactataacattgtcggtactgttcaaaatgtagatgactatgtagagatatatgcacaagggaatgacgcagatatagagagatttattcaaggtgtaattgaaggtgcctcaccagcatcaaatgtaacgagccatcaacttgaagagttagaactaaatcaaaaattatcggattttcgatcaatataaaatgctaaataaaggaagatgacagtgagatataatatttctcatatatttggggtgttagtgggaattcctgtagcgtttttaacaagcatatttgggatgattgcacttgatgtatcttttttaattgatatgtctattggtattgttggctttttaatgacatacctaccgatacaaaaactcacttcacgcaaatatttaaaacgaaattggtttttgactagaaaagactatcgctatattcgaaatcagttaaatcatacacaccaaaaacttagaggtattttaaaaacgtatgtcaatataagatcaattaaagattttaggcaaattaatgatatataccaaatttcacgttctatttatacgacagttagacagagacctgcatcattttataaagttgaaggctttttttattctcatattgataatgctttaaatttggttgatgcatatacacgtctagcaaaaatgcccaaaaaatcaattaatgaacagcaaaaattagaacaaacacgaattactttggatgaggtaaaacgaacattaatcgctgatttaaagcgtctcaacgaagatgattatgaacgtttagatattgaaatggaattaaataagttacatcaaaagcatcatcaagattgatgtaaaatagcaactattggagagatgattgatgactgaaaataaaagtttcaaagaaagccatccactagatgattttataagcgataaagaattatcgaatactactattcaaaaagaaaagttaactattgaacaacaaaaacaggtagacacaatcagtaaacaaattaaccctttagacaatgaaggtttattagcgtttggttctgatttacagaaacaaatgtctcaattttcacatcaaatgttggatgaagtacaaagtaaagatgttggtcctattggagatactttgtcagatctcatgtcaaaactaaagtcagttaatccaaatgagttaaatactgataaaccatctatgttaaaaagaatttttagcagagcaaagtcgtctatcaatgaaatcttttcaagaatgcaatcagttagtgctcaagtcgatcgcataacgattcaactgcagaaacatcaaacacatttaacaagagatattgaattattagatacgctatatgataaaaacaaacaatactttgatgatttatcattgcatatcattgctgcacagcaaaaaaagttgcaattagaaaatgaaaagctaccacaattgcaacagcaagcgcagcaatccactaatcaaatggatattcaacaatttgcagatatgcaacaatttatagatagactagataaacgcatatatgacttacagctttcaagacaaatagctttgcaaactgcgccacaaattcgtatgattcaaaatgttaatcaagcacttgccgagaagatacaaagttcaattttgacaagtattccactatggaaaaatcaaatggctattgcacttacgttaatgagacagcgtaatgcagttgctgcacaacgagctgtcactgatacaactaatgatttattaacagcaaatgcagaaatgttgaaacaaaatgcgattgaaactgcaacagaaaatgagcgtggcattgttggccttgatacattgaaacgtacacagagtaacattattgagacaatagaagaaacattaattattcaacaacatggtcgagaagaacgacaattagctgaaaaagaattacaacaattagaacaagatttaaagtcacatttagtgaacatcaaaggaccgaataaacaatcataaattacgaattagatataacaaaaaaggaagcatcctaagattaaatgggagatgcttccttttataatattcgttattcctgttgatatttaattggatcttgttttacaaatatgccgactagatagcctaatatcgttgcaataattgctactgggaaccactctaaagaatacgctcttagaggcaatgattctataaagttaattttcagccaacctaacttactaataacactgaaaatcgacaatataaagatgataataactggaatttgttgtgtaatacgttttgtcggtatgaatttggcaattaaaattaataatacaacagttattgctactggatatacaatacttaataccggaattgacattgagataacagcatttaaaccttggttagcaataataaaactcattaaaatgaaaactaatacaaatgctttgtatgatactttaggtacgattctatggaaatattcagaaactgcaacaataagcccacatgctgtagttagacatgccagcgccacaataatgcccaataaatattttccaaatgagccaaatccagttgaagccattgtcgttaataaatatgtcccaatgtttcgatctttggatttcaattgatctaacgtcatgtcacttactggcatatgattaccaatataacctaatgaaatatatatgaaaattaaagcaacggctgcaatcaaaccagcagtcaaagtttgtttgaatatttgatttgttttagtaatacctgttagttttactgcattaacaacaatcattgaaaaagcaattgctgcaatggcatccattgttaaatagccttgtgtaaagccttcagcaaaacttgaaaaattagaatgatatagtgcttcattgccctttccagcactattaccgctaaagtctaagtatcctttaataatcatcgctaaaatagtaattaataataatggtgttaataatgaaccaatacgatcgattaacttagatggatttaaacaaatatacaaaacgactatgaagtagataatcgtaaatataaataaagcgatactactattgctatgtataattggtgtaattgtcatttcaaaagatgtagatgcagttctaggtattgcgaaaagtggtcctatagtcaaataaatgatgattaagaacaatattgaaaatttaggtgaaattttatttaatgcgccaatatatccttctttatcaagtgcacctacaatcacacctaataatggtaaaccaatcccagttagaacaaacgctaaaatggcgggccagaaaaattgaccactatccaatccgagattaggaggaaaaattagattgcctgcgccaaaaaacatagcgaagagcgtaaacccaatgacccatgtatttttattcatagagttactccttttttaaaacacaaaataatttacaagtaaatattctagcacaaaaaataataaagagtctatatgaaatatgttgtacatagcagaatcaaaacacatgtgttgtttaaatcaaattatgccagaaaataaaattcttcaaatttactttttatatagtaactgatgacttttattcacaatttcatataaactcatattttaaacttatttataaagatttaagtagtaatttttttaataatggagagagatgtccaggtaaatgcgcaactccttcaacgaaaatggcatattgaccataaatattatgaattgtttgttcaacatcttcagttattggatcttgactcaaaaatacattaaatacttcaatgccaaatttacgtgacatttctacagcttcatacgtatcaataataccatcttgactataattaaatgcagacggttcgccgtcagaaaatacgattaaaaatcgttgatgttgatttcgacgcattaatcgttcacttgcaactctaatagcaacaccatcacgattatcatcttgaggttcaagtgccataatacgtgggccatctttttcaaaggttgagtaatcatagttaataatttcattaatgatatttggttgtgcatgctcgtctgaatcaaaggcatcctcactgaatgataaaatttcatgtttaatgttcaatgcttttaacgtctcgtggaataacactacacctttcttcgtttcagccattttatcatgcatacttgctgacgcatcaattaacaatgtaaacgtcgcatcaaatgatttacttaaatcttgttttttgtaaaacaatttatactgatcgtcgataaaccagttaattaaatccttttgtaatcgcccttttgttaaattaaaacgtgcatctcgttgttctcgttcaatcgttttctttataatttgaattaagtctttgatttcatattgtacgtcttgtttcaattcttgatattctaaaacatattgtggctcaatttcaggaatttgccattttatttctacatttttgttcacaccatcaagttgaaatgcctggctttgaccaacagcatcgccttcttcacgatttagcgtatcgtttgatcctttgccctttttggtcatcatatcagtcatatcgtctgtagcatcgccttcacgtgcttcatcattacctaatgtttcactattttgtccttcgtgaagctccatttctaaataggcgccaccttttgactcactatctgcagatttagagtcagctttttcactttggttatcatcatcttctgaagtatcatcttgcccatcgacttgacttgcatcagttctctttaaatcttcaaacgctggactagctaatgtattatatagtgttttaggtaagtaataatattcgtttagcatatcttcttttaaaatatcatctacttgatacataattctttgagccagatacatattatcttcagaattttgattttggaaaaaattaggtaaatataagaacatattaactaaaatatcatctaaatctgaatgtatagatggtatatcaaggaaatcttgacttaaaaatgcatgttctaaatataaaaataataaatctgtatattgtgttttagtacgatacactttaatttgagattccgtatatgatatccgtgtatctaagcgaagatcaattaatttagcagtacttgggcgctcaactttaatagaatttaatacgcgcatatcttctaataatttaaaaagttgttgataaaatttagggtgtttaaaagttttatcttgtactacttcatttacaatttgtacatccatcatatgataaccgtaagcagctaacataacatctgtttttaaaccagccatttcgatatggcttggtcgatgtgaccaaaaccaactcgtaatcaaaatattttgaacaggattatagtaaaggaatttttggattttaacttgtgtttgttcattttttaataagagtcgagctaagtcttgcaacatcattacttgcttggcatctaactgttcgtcgttaaattttatgaaacgatcactcatgttttatccctctttaaaagtttagttctacagcattatatattgcttgttgttcacgttcatcttccaatttatcaataattgtacgtttaattgcacgttcaactggcattacagtgattaaatcacacaagtctaataatgcacggatactagcggcttcttcagaaatttgtccctgcttagacatagtacgtaaatcttcgttaaacttaataatttgttcgatttgtttatcatcttgtaataaactttgctctttaatcacattttttaaaatgtccccgtcaatatagtcaacgtgaataacaacaaagcgattttttagtgcttcattcattggcaatgtaccaacataaccttcatttatcgctgcaataacgttaaatcctggtacagctttgattacttcaccagtgtatggattcgtaatttgacgacgataatctaagaccccatttaatacaggcaatgtttcaggtttagccatatttatttcatcaatatataaaatatgcccctctttcatagctttaataactgggccatctacaaagacaatttcttgttgtccttccgcatttgttttaattgttttaaagcctaataagctttctgtatctaaatcaacagaacagttgacttgatgcatgggtgtatcaacaacttcacttaatgtttctgccaacttcgttttccctgaacctgttggacctttaagtaaaatatttttatttaaatcgaataatgccttcgcatcattgaaaactgttgaatctgaattcttataatgttttagtgccattttaaaacgttctcctttaaataaattaaaaaactaagacatggaaaaagttctccaaatgccttagtttactattctattctgatctaaaacgcaatgcttagtatgcgaattgtttatatttcaccaaatttactaattgaaaatctcatattaggcttcatttcaataattatgcgtttaaacttctttgaaatatgttttatagtaaccgccaactaatccagaattatctattatttgataatattcttcagtttcgttgataacatcatattgtttgccaaccgttaacatgtcagaaactgtaaatttctttgcatctgtattaatgacttctactttcttgattggtgtacgttctttccaagtttcatgtaacataaattttgtcctcactatcgtaaaaaaattatttttgtaaagtgaatataaacgataatccactgttttcagtaattctaattgattcaatatcatcttgctcaagcgtttgatatggtatttccacttcatctaagcgcgatttcgcttgattaaagaaatctgcatctttcgtttcaaactcaacttgatcgactgcgccatattccggcattgtcatttcggtttctacaggcattaaatgtatttcgccacctagaccacccgttccaattttgaatacttggacatgatagtcagcattgtcgaagggttgatattctgcaaatacttcaagtccgaatatatttgttaaaatttgacctgtaatatctacatgattcactttaagaatcactggccctaaaccttgcacttgatgtaacggattgaccgcactttcgaaagaaggcatgcctaaaccaacgccataattattctcgtttgaatatatagagaaaatatgaccattgttatcttcgagactgaaatatttattgccatttaattctttaactgttgtaaatggaatatccttactcgataatatttccgcatactcctctaaacctgagtcggttggtgtacgtaatccaatacccacaaagtgagattcttctaattgctcacttggaacttgtataaattgaagtcttgttcctgggcttatatctgcatcgccgaaacgaattgagttttcaagaagttcttcataatttaatcctaatatgtcaaccatgaaatgttttgtctgttctatatttgttgtacctaatgttatacttctaagtccacacattatagccacctctatctttatctttactattatattataacttattttaatcataaattatagaatatcggtcagttgattttgattatagattaatatgtgaaaaatgtatttctttaaaagaactatttcatttaaataggtaacataatattgttatggttgctagtgagtgtgtcattaatgaatatctgtatatagcaattgaatatttcgttttttgtaggacatgaaaaacatatatatgtcgtgtccataaagtgaatttacatcttgttcagatgattttaaattaactaaaggcgcttatagaattcataaatttcatcgcttgttattatctaaaatgaattcattagcatattgaaacacgatattctacctatatttctattgtgagtctatttcaatagaaatgatatattttttaagtagtcaaaattaaactcacattttaatacgaagcattgtaaaaataaagtacagcagtaagatatttcgactagaaaataatcttactgctgtttgttattgatttgatcccatttttaggaatagtaaactattttgtgttgtggattaagattctaataataagtcttctgggttttcaattaattctttaattgtttttaagaatccaactgcttctttaccgtcaataattctatgatcatagcttaatgcaatatacatcattggacgattttcaattgtatcttgatcaatcgcaattggtcttgtaataattgaatgcatgcctaagattgcagcttgattaccattgataattggcgtactcatcattgatccaaaaataccgccatttgtaatcgtaaatgaaccattaaccatatcatctaagccaagttttttctctcgtgctttaacagctaaattagcaatttctgcttcgatttctgcaaaattctttttatcacaatctcttacgaatggtactaatagtccatcatctgtagaaacagctacaccaatgtcataatattgtttcgtaatcatgtcgtcgccgtcgatttctgcattaacttctggatactttttcaaagctgctacagaagctttagtaaagaatgacataaatcctaatttagtaccatcatgatctttcataaattgttctttcttacgtttacgcaattccataacatttgtcatgtcaacttcgttaaatgttgttaacatagctgtattattagatacctctaataattttttagcagctgttttctttctgcgtgacattttttcgcgaatcactggttttgtaggatattgattgtattttttctcttcttttgcaggtgcttgttgtgttgtttgtgttgatgccggtgcctgttgttttttatcaatatcttctttacgaacaacatcatttgttttcggacttacttcagcaagattcacaccgttttcacgagcatatcgacgcgcagaaggcgtagcattaacacgctgctgattatcatcatttgtttgattgacttcagctttatctgccgatttatttgttgtttcttcttttttattatttgttgtttcatcattttgttgtggagtattgtcgttactattttctttagaagcattgccactaccttcgccgatgacagcaattgcttgtccaacttctacagtgtcgccttcacttgcaagttgttcagataatacacctgcttcttcagatacaacttcgacattaactttatcagtttctaattcaagaatagcttcacctttttctacgctatcccctacgtttttcaaccattctgcaatggtaccttctgtaatagattctgctaattctggaactttaacctctggcatgacttatttccccctagttattttttaatgcattttctataattttattttgaacaagtttatgaatttctccatcgccttcagctggagcagccctttgaattctgccatgataacttaaatcatatttgtctgcaacaagcactttaacatatggataaacatataaccaggcaccttgatttttaggttcttcttgtacccatgacacttcttcaaggtttggcaattgtgctagtaatgcttcaatctcttcctctgggaatggatacaatctttcaatcgcaacgagtaatactgattcgtctggatttttagctaatgcttcttttaaatcaatgaacattttaccagttgccaaaataacttttgtaaccttatccgcttgatatgattctgtcaaaattggctcaaatccaccagaagtaaattcatcaattggttttgcaactgttttatttctcagtaagctttttggtgacataacaaccaatggtcgcatttgttcagaatctaaactagccgcttgtgcacgcaataagtggaaataattacttgaactagataagttgacaactgtgcaattattttcagcagctaattgtaaaaatctctctaatcttgctgatgaatgttcaggcccttgaccctcatatgcatgaggtaagaataatgttaatcctgaacgttctccccattttgagcgagaactgaataagaagttgtcaaaaatcatttgtgacatatttgcaaaatcaccatattgtgcttcccaaatattgaagctttttttgttttccacattatagccgtattcaaaaccaactactgctgcttctgaaagcggagaattgtgtatatcaaatgtcgctttttgatcaggaacatgatgtaaaggtgtatatgtttcacctgtttgctcatcatgtaacacggcatgcctatgactgaatgtaccacgttcactatcttgaccagttaagcgaatcggtgtaccatcttgtaaaattgtcgcaaatgcaagttgttctgcttgtgcccaatcaactaaaccatcttctttattaaatggctcatgacgcttctcaagaactttgtttaactttttcaaaatgttaaagccatccggatatgttaacaatgcatcatttatttctttcaagtgatcaaacgtaaatgattgttcgtctgcttgtaacggtaatgcaagatctgcaggcttttccatatctggattatccatcttatcagctttattaattttatcatgagcttgtcttagttccttttggacttgttctataaatgaatgcatttcatcttctgaaatgacaccttcattaacaagctttttaccaaacacatattcaacagagtcatgtttgcgaatattctgataaggaactggattagtaattgatggttcatccatttcgttatgtccgaaacgacgataacctactaaatcaataacgacgtctttatgaaactcttttctaaattccattgcaatatcaattgcttcaatagtagcttcaacgtcatctgcattgacatggaatattggcacatcataacctttggccacatctgtagaataagttgttgaacgtgcatcaattggttctgtagtaaatccaattctattgttagtaataatatgcaatgaaccccccgtagaatagcctttcaagtttcctaagttcattgtttcgaagttaattccttgaccaggataagcagcatcgccgtgtataataattggcattgctttatgatgatcagtcgtcggagccccagcacgctgtgtatcatcttgtgctgctcttgtacgcccttcaacaacaggtgcaacaatttccaagtgacttggattgttagccagtgcaatacgctgcattgtaccgtatgaatcagtagttttaataccaccaaggtgatatttcacatcaccagtccatccagcagttaactgcaagctaccatcttcaggtaaaaatttcattggatctgtatgcataaattctgaaatcatcatttcgtacggtttttctaagacatgcgttaaaacgtttaaacgtccacggtgagccatgcctatttgtatatttttaataccttctttagcagcaatcgtaatagtacgttgcaacatcggtacaagtgcgtctaccccttcaattgaaaaacgctttgcaccaacgaagtttttatgaagatatttttcaaacccttcaacatacgctaattgtttaaatagtgcccttttttcgttattatttaacgttactttatatggcgtttcaattcttctttttaaccaaccacgttcggtattgttattaatatgtgtatactcaaatgcaattggtcctttgtaacgtttttccattcttaaaattgcttcataagcattatcataaatgtcggcaaagtgatctgaaacaattcctgctgatataccttccaaagtctgttgatctaaatcaaagtcttcaatctctaatttaggtacatgtttccttttcggaggatttacaggataaatatcggctttaagatgcccgtattggcgaatattatcaatcaaacgcatgacacgcttaattgtgccgtcgctattttgactacttgtactttttaaagctggtacaattgagtcatcattcttaattgtgctgaataagacttgtaaatcttctggtacagatgatggatcttgtaaaaagtcatcatatagatctaacattagacctaaattcgcaccgaagtttacaggagcctctgaaacttcttttctttcgttagtcattttacaccctccacaaaaatgttgaaacgcttacaatgtaataatatcactatttagttatttgttaaagtagatttacctatttatctactaaaaagaagaatcaacaaaagcgttgattcttctaggtttatagatatattttattgtaaattttgggaggtgaattccacagaaatgataaagaaccactgtttatttgttttatagttgttcttatacattagtcacagctaatgtgtacttaaaaaattgatcctatgactttgattgacgtcttagacatgattaaaatatgattttaaacgttgttcctttgttaatttcacttttaattttaatcgatccaccgtttaattgaatgattttttgcgcaatagataatccgagtccattaccgccttgacttcttgaacgagatttatccactcgataaaagcgatcaaaaatgaaatcttgatcttcctctggaataccaattccatgatctgtaatttcaattattttttgcttattttttaaccttgtcttaactttaattttcttattcttcacatcatatttgattgcattatcaataaagattaaaaataattgttcgaattgatgaggtttcattttaatttctagatttttagatgtcaaatccgtatcaaaatgataatcaggatgcaattgttttaatgagtgtattcgcgagcgaatttcatcattaatatgcacggtctgcgcttcagaagaaatgtcatttacatctcctttagtcaattcaagtaattcttcgactaattttatgatacgattcatttcttcaatagaaatatttaacgattcttctaatactgctgggtctttttttccccatcgctgaatcaaatttaaatgaccttgaataatttgtaatggtgttcgtaattcatgtgacgcatcttcaacaaattgtctttgttgattaaatgattcttcaatttggctcatcatctcattaaacgtatttgctaaattatctatttcttcataatttgtatttaattgcaatttattttgaaaaccatctcgtcgaatctcaatcattttatttgataaactgacaagcggtttagtaatttgagttgaaaatacataactaattgtggcagttataattgttgcaatcactccaaatgcgagcgcaataatatacaatgattttacgatgttatcataattttctagtgaatgaattaacaaactataccctttgaaatcttgcgttgtgattggttctttaataattaaataatcaatgcctttataacgtttttttattacgcggtcaaaataccggtgttcataaccaggttcaactctcactgtgttatcattcgatgtctcaaataatttattattatgctcatcataaataataatctcttgaaaattacctaaagatgcattcaagtctaatgcagatatatctttaacaggcttagaatgaaataaattattaatatcgcttgagcttctttctgcatcatcaagctcactattatgcagtgtatctttcaagaaaaagataataattaaacaaaacaaaaatatcgtgacaaacgtaatcatcgtggtaacaataatccagttattgcgcaatttacgttttgtcatcgtatcacatacccaacgccacgaactgtttcaatcattttgtcacgatcgtatggttttaacttgtttcgtaaatatcttatataaacatctacgacatttgtttctacttcactattataaccccatacatgatttaaaatttgttctcgttgcataacatggtttttattttcagctagaagatatagtaaatcatactccgtttttgttaattcaatttctgcgccatttaccgtcactttaaaagcattcttatcaattgtaataccgttgacatcgataatatctttttgtggctgacgacgtaaaatcgcacgtattcttgctaaaagttcttcaatatcaaatggcttaactatataatcgtctgcaccgtaatcaagcccagcaactttgtcatacgtatcacttttcgctgtaattataatgataggtgtagattgttgttgtctaattttgcgacaaatttctaagccattaattgacggcaacattaaatctaatatgattaaatcatagtaatggctaagcgctttatctaaaccgtcttgtccatcatactctgtgtccacattgtaattttcatgtgtgagttccaattcaagaaatcttgctaagttttgttcatcttctactattaaaatttgcgtcatttgtacacctcatattacgactttttctaataaggtaatatattttaaattttgtatttttccatacaatagttgctttttaaattagtttgtttacgtttaaattttatcacaaatcaataaccatgttttaaatttttcaagctacaatcattaattatttattaactcaaatatttaataatcagttaatggcattctgttaattctgattgcagtacttaaatatagaatactgtaacacaaggccttaccgcaatattaattgttgtcatatactgacttttcactattgtaaaatgaatagttattatctttattttcacaaaatgaccgtagtttaaacattgtcacacatcatttcaatgtgcgattttgaacttacaagtaacatttcttaatgtatgaattcaaaagaagtatgtaaacaatataatttttaagcctcatcacttttaaatattctaattctactgagaaatacaattttttttattttctaaaatagcgtaatcatgcgttttatttactattcttaaaaaatattcaaaaaaagttttagtttctaattgacaatgattctcactaatgtataatagtagttgaaaatgattatcaataccacatagaacatcccccccacaacgtttcgttcttgttggattggtcattttcaaatattccccttttatatgcccgtaaaagacaatatacgttataacaacgttttataaaagcagtaaacccttacgacactttaggtttactgcttttgtttttttactatttaattgattaatttatttctaagtaataacgttgataaaataatgcaaaatacgccaccaataatgccggcaataatatctgttggataatgtacacctagatatacacgtgatatggaaatcaataaaatcatagctgcacataaccctataagaataccttttgaattaccttgatttaatcgatttaataaatagataccacttccaaaatatgcagttgatcccatagcatgaccgctaggaaaactaaatcctgttatatcaattaaacgcagcaatgtaggtctttctctatcgaatatattttttaatgctggattcaaaattccagataatgccattgttaatgcaaaaaataatgcttcaattttgtggcgctttaacatgagatatgccacaagaagtaatgaaatacataacattgcccagacttcacctactttagtagccccaagcatgatagatgtcgtaataaagctctctgatgaatatataaattcataaacttcattatcaatccatttccctagtcttgattcgtggaaaaacgcgataattccaaaaaccaatgtaaaaacgatgagcaaagagatacgtttccattgactcataaagcattaccccccattaattcaatgcgtctttaatcatcttatcaaataaagcttctttcgtataactttgttcatacgatttcatattattgataattcgagttctttcctgttccattttatttagctcttgtaataaaatttgtgctgttaattgttcttcatcaatcgttttagcataacctttatcagcaaaatgatttgcattgtcaatttggtcgcctcgggattgatctaaacctaatggtactaataacattggtatacgtaatgttaagaactcataaatcgcatttgaccctgctctacttattactgtgtccgtaattgctaataaatctgttaaatcatctttaacaaattcatattgtatatatcctgattttttaacttgagcatcttttaatcctttaccagttaaatgtatcacttgatattgttgtaataatgcatctaagttttcgcgaataatgctatttaattttttacttcctaagcttccacccataacgagtaacacttttttattttcattaaagcctgttaattgataaccattatgtgcattaccattttttaaatcttctcgaattgttgctccaataaaatcagctttctctttaggtaggtagtttagcgtttcttcaaatgttgtatatattttcttggcaaatttaagtgctatcttattcgctaatcctggtgttaagtcagattcatgaataatagttggtatatttaatgatttggctgcaataacaacaggcacagatacaaatccaccttttgaaaataatagatcaggtttttcttttttcaaaactttgcgagcatcaagaataccttttaatactttaaatacatctttggcattttctaaagaaatatatcttcttaatttaccactcgaaataggataatacttaatttctggtagttgtgattcaatcatttctctttcaataccatttttagaaccaatataaagcgcttcataaccttgtgataatgcagttggaattaaacttaaatttactgatacgtgtccaactgttccccctccggtaaatgcgattttcgtcattaatattacctctattcttttaaatttttataatatgcataaaatggttcacctttatcatatggcggatattccattaattgttcaccgaccttatgaaatccaaatttggcaaataaaccttgtgcaggtttgtttaacgcaaaggtgtccgttaaaataacttctgtaccacgtgctttaactacatcaataacataattgaataattctgtagcagctcctttatattctttcgaaccagttaatcgatgaataacaaaggcaccttctctatttactggccagtcaatgtcatcataccattctgcttggtcttggtcgacaacaataaagccataaattttattattttcctctaatacgtacaaataatctttagcaatatcttcttcaaaatgttctaaaagagggtactgatcgtcccattgctcgttgtcgtgttctttcattaattcttttgcttcttctactagatttaagatttgatctaaatctgacattttacctagacggatcatgtacgtcactccttatatcgttatattaaacatgtttttcagtacatgttaatcttacacactattagcatgctttaaacctttattatgaatgaaaaatagtaattatcacactatgggataaaaataatcaataaaagtatcatataccaattaattgattgttaaaactagtgaataatactatttaaaaactatatgctcatagtatattaaagcatgaattgttaacagcgatgatagaaattgtgttatttacatcatttgtaaatgtctaatttatatcttttagagttagacgtcaataaaaataaatacgcctcctaaattgctatctttgcaaatttaggaagcgtgtcattaacataataataataaaattttagtagtgtgtatcgctttattttaaaatattaatcaatttatcgagaacatcatcatgtttattagctttttcaactaataactcagtaaatttattattcgtttctttattaaattcaccagttacctcgagtttattcgcttgttggaaagctttaacttgattttctaaagcttgatcaaattgtgttgattcattatcaactttataacctaaagctgataaaccaattttaatagttttaatatttttatcatcgtctccaactttaaatgttttcgtattaggaatgacatttaaagattgatatttaggtgtgtcaatagtaacgtctggtttaatacctttaccgtgaatataatgaccatcaggcgttaaccatttcatttcagtatattttaacaacgaaccatccttaaactctcttgtagtttgtacgacacctttgccgaatgtttttgacccataaactttagctttattatagtcctttagcgcaccagtaaacacttcagaagcgctagctgaaccttcattcactaagatggatatatccatgtctttcgcttcttttaacgcatcattagaagtttgaattgcttcagtatctttacctttttctagtttaacaacagtttttcctttatcgataaaaatatttgccattttaacagcttcatctagtagtccacctggattatttcttaaatctaaaacaatctttttcaaaccatctttgtgagctttaagaactgcatctttcaattcacctgatgtatcattctggaatttattaatagtaataactccaaccttaccttttttcttatactcaacgcttttaacatgaattttttcacgtttaatcttaacgtctttttcttcactgcctctttgaacagttaaagttacttcagtgttttctttaccgcgaacgtctttgacaacttcgtctaatgcttttcctttaattgattttccatttactttagtaatgacatctttaggacgaatgccagcacgttctgctggagaacccttcatagggctagtaaccataatttgatcatttttcttttgcatttctgcaccaatacctacaaaatcacctgaaacaccttcattaaaggatttagtttgttcttttgttaaatattcagaataaggatcttttaattctttgaccatgccatcaattgcagctttactcaacttgtcagagttctgttttttataataatcactatttaagattttatacacattttcaattttatttaagtttgcttgatcagttttgtttaaaccacttattttttgatttataaaaatatatgcaacaactgtgatgacagctgttattaggattgtaccaattaaaattgatatgaattgccaacgttttaagtgaacgcgtttcgatgaattagtttgttggtcttgattgcttgttgcaatttcagcgcgttcatcatcggatgaagatgtgtgttgcttatcatccattgtatcacttccttattatgtacttttaaattctgtgtagttaatcatatcaatttatgcaagatagcgcaccatatttcactataattgattaatttttagtcacaacttagtttattttaaattaaaaccaggataacaacttgcatcaccctggttctaactattagtattaaaaattatattaaaattttagccattctgtatattcttcatatagatcatcaaatacagacattggcaatgtgaaatcaccatgtgtctcaatataatcagacagtatgttaaaatcatcatcgtgttttgggaaagcaagatcgtcaaatatctcttctgctagacgacctttatcgtcgtgtcgaccacgaactgtcatgacaaattgataaaacgaatagtttttcattagttcattgtcacatcaatcactttagtttcacctttaatcacagcattttcatcataaatattaattgaagttgcttgatcagtgttagtaattataattggtgaaataacagatttagcattattattaatatattcaaggttgaatcttactaatggatctccgacgttaacttcatcaccactagacactaacacttcaaatccttcaccgtctaattgaactgtgtctaaaccgatatgaactaataattctaatccgttatctgcttttaaaccaatcgcatgcttagttggaaagacattgtcaacacgtcctgcaattggagacacaacttctccttcagttggattaataccaaaaccttcgcccatcattttttgtgcgaatacaggatctggaatatcttcaattttcacgtattctccagttaatggtgcataaattgcgatatctttctgaacttctttgccttttccgaataattttttaaacatactttccactcctacttatcaaaatgtgatattaaatcgccataacccaattcttctaatttttcatatggaataaattgaattgcagcggaattgatacagtatcttaagccgccactttctttaggtccatcattaaagacgtgtcctaaatgactatttgattcttctgaacgcacttcagttcttaccataccaaatgatttgtcgactaattctataatttcatcgtcatcaagcgctttggaaaagctaggccatccgcactcagaatgaaacttttcttcagatgtaaataaaggtttaccagaaatcttatctacataaatccctttagcaaaatgattccaatattcattcataaatggtggttcagtgccattttcttgtgtaacaatatattctatatctgttagttcacttttatcttttttaagcattttgattcccccaatgtgattctataaacgcttttctacctgaaccacgttgatattggtaataatgtaccgggttctttttataataatcttgatggtagtcttcagctggatagaaatttttatatggtttaataggtgtaatcactggtttcttgaaaataccttgttcatttaattgttgctttttaaactcagcagcctttttctgatgctcatcatgatagaaaatgactggttgatagctttcgcctctatcgaaaaattgcccttgatcatcggttgggtcaaatgttttgaaatatatgtctaatatattttcaaaggaagtaacctctggatcaaacgtaatttgtactgcttcgacatggccggtttgattcgtacatacctgttcataagttgggttatcaacatgaccgccactataaccagatacgactgacttgatgcctggatatgatgtaaatggtttaaccatgcaccagaaacatcctcctgctaatgttgcatattcttttgtcatatgaattacctcctctatctatctaattataaatttagtctataaaggattgaaatggaagtaattaacactgaaaagattaaatttacttcttaaggactacgaggccaatcgcaccttgaccagtatgtgcagaaataactggtgtagttacatttatatcgtaattattcacatgaaaagcttcattaaaaactttcttcaatttatcaacatattcaatgacgttagcatgtgcgacaccaacggatttgatttcatgatctcctataaattcagcaatttcctttttcaagtattggatactagaattttgagttctcgcattgtgcacaagctctaagcgaccatcatctagtgtaccaattggtttaattttcataagattaccaatcaaaccttttgttttactaattctgccacctttaattaattgattcaattgccctataactacaaataatttaatgttttctcttaaatgatttaactttttaactatttcagaagttgagacaccttcttttacaagctctactaggtgttgtatttgataccctaaaccaaaagaaatagattttgaatcaataacagttacattagcatctaccatttgacttgcttggtaagcagtgttaaatgtaccacttagtcctgaagaaagatgaatacttatgatttcagagccatcttttcctagttcttcataagcagatataaattcacctatggctggctgacttgtctttacatcttcatcattttcaatatgattaataaattcttctgatgtaatatctacttggtcaacgtatgaagctccttcaatagttaaacttaaaggaattacatgtatgttgtttgcttctaaatattctttagataaatcggatgttgagtctgttactataatctgttttgtcatggtcgttttcccccttattttttacgaattaaatgtagaaaggtatgtggaattgtatttttctcatctagtttaccttcaactgaagaggcaacttcccagtcttcaaatgtataaggtggaaagaacgtatcaccacgaaatttaccttcaataacagtaatatacatgtcgtccactttatcaatcatttcttcaaataatgtttgccctccaaatataaaaacatggcccggtagttgataaatatcttcaatagaatgaattacatcaacgtcctctacgttgaaacttgtatctgaagtaagtacaacatttcgacgattcggtagtggtttaccaatcgattcaaatgtcttacgacccattactaaagtatgaccagttgataattttttaacatgcttcaaatcatttggtagatgccaaggtaattgattttcaaaaccaattactcgttgcaagtcatgtgcaactagaatggataaagtcataattatcctccttcttctatcatttcattttttattactaagttatctttaatttaacacaatttttatcataaagtgtgatagaaataatgattttgcataatttatgaaaacgtttaacacaaaaaagtacttttttgcacttgaaaatactttgatgtcattttgatgtctatatggttagctaactatgcaacgactacactgctattggagcttttattgctggatgtgattcatagtcaacaatttccaaatcttcataatttatgtcgaaaatagacttatcactgttaatttttaatgttggaggattgaagctttcacgtgctaattgtgtttgaatcgcatcaatatgatttgaataaatatgtgcatctccaaaagtatgcacaaattctcctacttcaaggccacattctttggcaataaggtgtgtcaataaagcgtagcttgcgatattaaatggcacacctaaaaagatatctgcgctacgttggtataactggcaacttaacttaccatcttggacataaaactggaacatggtatgacaaggcggaagagccattgtgtcaatttctgttggattccatgcagatacgatgtgtcgtcttgaatctggattatgcttaatttgctcaattactgttttaagttgatcaaaatgattaccatctttatcaacccaatctcgccactgtttaccataaacatttcctaaatcaccgaattgcttcgcaaatgtatcatcttcaagaatacgttgcttaaattgtttcatttgttctttatattgttcgttaaattcaggatcactcaatgcacgatgcccgaaatctgtcatatctggacctttatactcgtctgatttgatataattttcaaaagcccattcgttccaaatattattattatactttaataagtattggatatttgtatctcctttaatgaaccataataattcggttgctactaatttaaaagaaactttctttgtcgttaatagtggaaatcctttagataagtcaaagcgaagttgatgaccaaatttcgaaatcgtacctgtatttgtgcgatcatttcgtgtattccctagttctaaaacttcttcacaaagactgtgatatgctgcatcaaatgaattcaacatatgcgataacacctcatttttattatttatagtatgtatatttagttctatataatttaactttatgtagcattttgttatcactcattttaggaatatgatattaatatcatgaattccgttactttatttataaaatgatgattaagtacctgccacatcataacgtgatctatgtttccaattgctaattgtttacccaaatctataattttaatgctaaaaaattttaaaaaagaggttaacacatgatttgaatattatgtttgatgtcctattaaaacagttaaatttctagaaaatatagttggtaagaacgtactttatataacaaatggaatacaactatattctctattttcaatgacagacaccatttttaatattataaaatgtgttaacctttatatttatttatgtgtactatttacaattttcgtcaaaggcatcctttaagtccattgcaatgtcattaatatctctaccttcgataaattctctaggcataaaataaactaaatctcgacctttgaataaagcatacgaaggactagatggtacctgctgaatgaattctcgcattgtagcagttgcttctttatcttgcccagcaaaaactgtaactgtatttgtaggtctatgttcattttgtgttgcaactgctactgcagctggtcttgctaatccagctgcacagccgcatgtagagttaataactacaaaagtagtgtcatcagcatttacttggttcatatactctgatactgcttcgctcgtttctaaacttgtaaaaccattttgagttaattcgccacgcatttgttgcgcaatttctttcatataagcatcatatgcattcatatttaattcctccaattaaattgttctgttcgtcatttgtttccatactgaaccaagtgcttgatctccgttttcaatacgagatatggccatttcaatttgtaatttaacttcaaacgcattgtcattaatatgggctttaagtgcgggaagctgctctgcattaccttcatcaaagataaacatagcagcacgccacctaacgattttctgtggatcatctaatagtagcaccatttctggtagtgcctctggataccctaaatcgctaatgcaatcccctgcagttcttcttacagcaggacttttatcacgaagccccttatataaatacggtaaaatttctttactttcaatcatgcctaatagtacaatcgcttgacgtctaaccggtactttttcatcagataaagctaaatcaagcagcggtatatcttcaaaagtcggctttggaaaatggtttaacattcgtaatcgagtcttccaattatcagtcgcatgatattcatccaaagagacatgtcgatagaaatgataattattagttgcgtgattttcttctaaagcatgttttaccaatacaggtaactgtgattctggataggtaactagtacttcttctaggacaccatccattacttcttcaatatttccatagcgatttcctaaatctagccatttacgcataaaaacaatattgtcatgttctgtttgtgcttgagtcatatgatcaacatatgtttgtggtaattgttctcttaattcttggtcagcagaagttagtttaatttgatacggtatacccttaaaagttaatagttcagctttaatttcaccaaaatgattgtcaatttgtgggtcttttccagtttccattacctgactttcaccagaaaaaacagctttaatatcaggtaatatgacttcccaatcagcttttggtgccttatcaacagctaagaagttcatgacatgaaaaatggaagtgataccatctatagataacaactgatttataaatcttggttgattttcttctacttttttataagtattagacaacttgtcttctcttgtatatgacaaaacaactttcattgtatttggacttggcgttggctctatacgtaaaatttccatatactttattccccccgaatactagttgatgaaaaatttattcgaatacagcctctacttttggcaatactgtttcccaatttgcgtcattttctttatctactgaaataaagtccataacatggaaaattgatttaacaccttctacctttaagatgtcattaataaaagctggctgtgaatcatcaactttagtatacgtatctgatgtcataccttctctgctttcactaagtgtaatcttcattgtgttgtggttcggtgtttctgatatagatataatttgcatttgacttcctcctattgaagttcatttcctaattgttttatttctttccctattgaacactcattgatacaaaaatgatgcgccttcgttttcccctctaatttacgcagacgagttttgatcggacattgattgcaataagtattcattaaatcatctattttcgcgagtgcattttgctctgaaaaagttaaaatacgcgacacttcctttattacttcaaaatattgcaaccttgtaaataagtgttactgttttaaatttgacataaaaatattataacatttttgaccctaagatttgaatgaaaccttttacaattctatacgtaaaatgtatttatattcaaatgctattgcatcgcaaacgatttttcagtaaaatgagtaagttatttattgagcggtttctaaacacccgcatgatcaaaatttaggaggacattttaatatgtataatgaaattttaggactagttacgtttattgcaacgttcgtgcttatggtacttatgtatcgcttttttggtaaacaaggtttaattgcatgggttgcaattggcacaattattgccaacatacaagtgattaaaactgtagaaatctttggtatttcagcaactttaggtaatgtcatgttcgcttctatttatttagcaacagatatattaaacgatatttatgggcgtaaagttgcaaaaagagcagtttggttaggcttttcatcaacattaattatgattattgttatgcaattgtcattacattttattcctgcaccagaagatatggcacaaaaagcattacacgcaatctttgatgttgtgccacgcatagctttaggctcaattgtcgcatatattattggtcaacatattgatgtatttatcttttcactaattaaaaaagtatttagttctgataaaacgtttttcatccgtgcatacggtagtacatttttaagctcaataattgatacagctttatttgtagctatcgcatttatcggaagtttacctggtacagttgtatttgaaatatttattacaacgtacgtactaaaattagcttcaacagttatcaatgtaccatttggatatattgctaaatcattttatcgtaaaggtaagattgataaattagatcaaggctattaaataatagttttcgtaagtttatttgagaccttttcagaaaaagtaacgtagtgcttttcaattaggaaaatatctacaactgaaattgaatcagataacgcctcaaattcatagcttattttacgacacgcgttacttatttaagtgatgcgtgttttttaatagattgtttaatgtattttatattacagtaatagtaactttaattaagtattgaatagaaagtaggtttattatggcgaaaataaattttgatgccgcgacgaaaggaaatccaggcataagtacgtgtgccgttgtaatcaaagaagatgagcagcattttacatatacacatgagttaggcgaaatggataatcacactgcagaatgggctgcttgtatctatgcattgaaacacgcccgtgaattaaacgttagcaatgcgttgttgtacactgactctaagttaattgcggatagtgttaacgctggttatgttaaaaatgcaaaatttaaaccttattttgatcaattggaaatatttgaacaagattttgatttattatttgttaaatggattccgagagaacaaaacaaagaagcgaatcaacacgcacagcaagcattgtacaaattaattaaaaagaacaaataaaaggagcaccgactgacaaaatttcaatcggtgctcctctttttatcgaagaaacaaattattttttattttttttagatttctttttcttctttttagctgctacctttttagaaggtttttttgatgccgactttttccctttggattggttatctttttgatttttctttttagccaataatacaggtacgtcctcatctttagaatcaatactacttgttgtttcaacatcttcctctttatcgcgacggcgttttgcaattaagattggtgaatgttcgttatcttgcaacactttttcatctgtgttttcatttgtaacttccacatcttcttcatcttcttttctgcgacgtttaggtaagaagaacggtgtatgtttaactttatcgagtgactcgtcattgtttagcgaatctttttcttcaacaatagcatcttcttcatcttcttttctgcgacgtttcgcaaataaaagcggtaaatgtttagtaccttctactgaacctttcttcttgtctttgctattatctctaatttccaattcttcctcttcatcctctttacgacgacgtttcgcaatgaagaaccagaagctagcaagtaatccggaaataccaacaacgccaagtgcgtttttgataacattaccaattcggtcaccgaaatgacgcatatgaagtggatcgatttcatcatcttgatccaatttcttcttatgtccaatagtcgtactgttatatggatgatttacagtgccataaccaacgtgtaaatgactattagattgaccatctgaatttgatgaaggtttgctatgatcagatgttacaatttgtactgctaaaattcgtgcgataccattattcaatgcagcctcaacttgttgtggcgtatgcgcattattaatatctctgattgtttcaagcacaatttcgttaattcgattcattgctgcttgtctttcttcagcagttccaattgtgctatttctaatgcgattaatttcatctgtagaaatatctttaattttagaaatcgctgattttttacggttttccaattctttagcaaatggatttgccgctttcagttgcgctttaaattgctctaattgttgcgcaatttcatcgatgctttgcgcacgttgaatcgcctgaattgattgatcttttaactgatttaatttagatatagcttcttgcttctctttatcagttaaatccttactagcattaatttcatcaatcatatgttggatagcatcagaaattgatttaatggcatttgatttggcttggtcaattgtaaattgatctggattgaattgttcaatatgcgcctgttcttggtgttgaacttcttccaccgtatgaacatctgctgcgttgttaatttgctcaatagcttgttgtttaagcttattaacttccgcaatcgcagcttctttttgttcaggtgttaatgttgcgtgattattgatttcattaatcttttgttgtgccgcattttcaattgattcaatcgcctgctgtttgactactgtcaattctttttctactactttcacaggaacactaacaatcacttttgatccatcaagcaatgttacttcaacttttgctgttaaactatcagaaattgttgcagttgacggtgtatcaataatttccgctgtaagttgatcaattaagttgatgtgtgcatgaatatcttgttcagtgatgatgtcatcacgatgtacaatgagttcaccatttacaaggatttgttcaggagttgcatcaaaaatttcatttacagcaggttgtgcatcaacttcccatacatgtgtatttctaatatcatctaatcctaaatttaatcctttatttaattgatctttagtttgagcattttcaatgttttctagtgctcgtttttcagcttcgtcaatttctttgagcgcttttgctttttgttcaggtgttaaatcagggtttgaattgatttgatcacgcttctcattcgctaatgctttaattgcatttttcgcatcttctttagctttcactaaatctttaatgtcttgtaatgcttgtgcaagctgcgctttggcttgttcaatttcttctttagtcatcacattgttaatgccattatgaccttgttgcaagatttgatttattcgatctttaactgcttgtttttccttatctgtaatatttggatttctatcaatttcgccaattaatgcttgaacttgcttatcaacatcttgtttcgcattttctttagctttcaccaaatctttaatgtcttgtaacgcttgtgcaagttgctctttggcatgctcaatttcttctttagtcatcgcattgttaatgccgttatgaccttgttgcaggatttgatttattcgatctttaagcgcttgtttttctttatctgttagatttggatttcgatcaatttcgtcaattaatgcttgaacttgcttatcaacatctttatttgcatcaattttagcttttggtatttcattggcatgcacttgttcaatcgcttggttgccagctgtttgaactcgagatacatcctgattacttgttgctttattaatgttattaatgatgctgtttgccaattcttctgctttatttttcgcaataagcttgtcttgatccgtcgcgtttgaagcttcgatttctttcaatttatctgctaatactttgttaacattttgaattgctttgtccttagcttcttgtagacgttgctcaccgttaagattttggattacatctttgactgcttgaattgcgccgttgatatcattcacatttgtgttatcactattaattaatgcatttgccagacgttttgcatcatcaaagtttgattttgcaacgtcgtcagcattttggtaattgacagtttgttctgcagttggaatttcattgtcaactaagtgtttcaatgtctccatcgcgttattcaagtcgatttgatcattaataatattcgctatacctgttacagtatcggcattattaattgcttgatgtgcaagatcttgttgttgttgatttaaaccatttaatgtatcaacaaatgcattggctttatctttagccgttgcaagattttgatcaccatttaaggctttttgagcatcgataatatgttgttttaattgttctgcctcagctttcgcgattgcactaccttgaactttatctaactcatgtgctgcatttgtaatggcattgtcataatttgctttcaagttatcgtctgcattgatgtaatttgtactgctaataacatcaagatgatgttcatcaatatactgttgtactgcacccattgcatcatctaattgaacagctctattaattgctcgagatgctttatttagcgtttcagcattattaatttgttgaattgctaattgtctttgagcattgtttagatgtgttaattgatccaatctttgtaatgcttcagacttacggttattaagtctttcttcaccatttaatgcctgtttcgctgccgttaccgcatcgttcaatttgataacttcttcagcagttaagttttgacctgtcgctttatttagtgcttccttcgctttatcaactgcttcatcgtatacgcgtttgacttgtgtatctgcattgacatagttcgtactacctttcgtacgtccttcattgccagtgatttcttgagacaattgattcattgcacgatttagtgccttagcctcatctacaatttgttggatttgatttaaatcgtttgattgatcgatgcgacctttaaatccatcttgttgagcattgtttaatgcatttaattggtcaatgtcatgtttaccatttgttttagcaagtgctacacgttcatcaccatttaatgcttgttttgcatttaaaatgttttgaagtgcttgatccacttgttgcttattcgcattttgttttaatacattttcagcttctgcaatagcttgtttataagcattttgcttatctaaatctgcttgcgtgtaatctacagtttgctcaacgttagcatgttcattaactgcttgttgcaattgatccatagattgattcaattgcgttgcttgatctactaattcagcgattggttgaagtttcgtcgcttgatcaatgttttgtttagcagttgcaatttgatcagcatttaaatgtgttaattggtcaatagtttgtttcgcttgtgttttagcttcagcgactctctcattaccatttaactcattttcttttccttgcagcttcgttaatgcttgttctacagcatatttatttgcatttgaaccattagttggatctgtaatgctttgagcagcttgtaatgcttgatctactgcatcttttttatccgttgatgcttcagtgtaatttggttgagccttatctgtgttcacttgatcaactttatttttcaatgtttccattgcgtgatcaagttcagtagcagtttgaacatgttgtgcaacctctgttcttgtaggcgctgcatttatagcatcagttaaagcttgttgttgcgcatgatttaagtttggtaatgcattaacagtcgttactgcttgttgttgatcacgaacaagtttttgatcaccatgtaggttatcttttgcagttgctactgcttgtgttaattgttccacttgtgatttatcgagtgttggattacctgtttggttaattaaatctttggcatgttgtactgctgcttggtatgcatctttttgtggcttatcttcattgataaacttgctaccagattctgtttgttgttgatcttgaatactattacgtaatgcttccattgcttgattaagtgcttttgcttcagctaatttttgtgctacttcatcacgagttgctgcgttgtttatttgactttcaagtgcttgacgttgcggattgttcaaaccatttaattgatttaaatcagtaaccgcatgttgtttatcgtctgcaagtttttgatcaccatgtaagttatctttagcttggttaacagcttgtgtcaattgttcaacttgtgctttatcaagcgttggattgctagtttgattaatcaaatctttggcatgttgtactgctgcttggtatgcatctttttgtggcttatcttcattgataaacttgctacccgcttctgtttgctgttgatcttgaatgctattacgtaatgcttccattgcttggttaagtgcttgtgcctcagttaatttttgtgctacttcgccacgagttgctgcattattgatttgattttctagtgcttgacgttgtggtgtattcaagttagacaagttatttaacgtttctgttgcacgttgcttatcttgagctaatttttgatcaccatgtaagttgtttttagcgtcattcactgcttgtgttgcttgatcaattactgatttaactaatgtaggatcagtagttttgtttatcaaatcttttgcatgttgtactgcttgcgtataagcatctttttgcgcttgatcctcgttaataaatttactacttgcttctgtttgtggttgatctttaatactttcttttaatgctttcatcgcttcatttaatgcttgcgcttgtgcaatgatttcagccactttatcacgagttgttgcattattaatttgattttctagcgcttgttgttgagctggtgttaattgatctaaatgatttagagaatttccagctgtttgcttatcttgcgctaatcgttcaacaccgtctaatgcatttttagatgatgttacagcttgtgtcgcacttgttacattacctttattgatagttggattatttaatcctgcaatgatagactcagcattttgaactgcttcatcatatgcttgttttttattcggttctgcattgacatatgcactgctcgcacgtgttgcatctttgtcagcaatactttgttgtaatgcatccattagttgatctaatgcttgtgcttcagtcaaatcatggttaacggctgttctagttgtttcactatcaattaacgtatcttccatatgtttttgagcattgtttaaatgtgctaattgactaaccgcttgtttcgcatgatctttatcattttgtaacttcacatcaccatgtaatgctgctttcgttgtattcacagttgtcgctgcttgattaatcacattgttatctaatgtcgctgtttgttcattgataatgttatttgcagcttgcactgcttgatcgtagttttgttgctctggttgatcttcgttgatatatttgctatttgctttagttgctgcgttatcttgaatactttctcttaagccatgcattgcttggttaagcgtattcgcattttgttcaatttgatgaactgcagttactaaagttgcagcagtaacttggtcttttaacgctgttttttgaggatcatttaagcttgttaaagcatcaattgcttgcgtcgcatttgttttagcaacttgtaaattatgatctccatttaacgcttgaagtgtagtttgaactttagtaatagcttgttctacttctgtttggttagcattttgaccagtttgtttgttaatcatggcttctgcttcatttaccgctgtagtataagcagtttgtttatcagtatcagcattgatgaagttaccacgttgttcaacggcttgatgatctgcaatcgcattgattaagttacccattgcggtatttaaagattctgcagtttgcttgtgaccattaactgcagcaatatcagatgattgcgtaatttgtgattgtaactgttgcttttgcgcattatttaaatgatctaattgatcaagtctattgttcgcttgttgcttagctgctgcaaggttttcatcaccatctaatgcaactttcgtgttatttacttgagttgttgcacgattaacatcatctggattcatcgtaggtgacgttgtttgattaatgatattattagcagctgttacagcttgattatagtcattttgtctttgcgcagctgcatcatgataatcttcagatgctaatgtcgcttgattatctgcaatactatttcttaataattccatcgcatgatctaacgcttgcgctttttgattaattgtagtgacatctgtaacaagtggcgcttgtgtaatttgactttcaaatgattgtttttgtgcatcatttaagtgtgttaaattcgccagttgttgtttcgcttgttgcttcgcattcgctaaattatcattaccatttaatgcttgtttcgctgcgttcacttcattagtgatgctttcaacttgtgcttgtacttcattagtaccactttgtttattcaataatgcttcagcttttgctacggcctgtttatacgcattttgtttgtcaggatctgcatttaaataattaccatccgctaatgtttgagtcttatcattaatagcttgtgataattgattcattgcttgatctaggctcgttgctgtttgtttaacttgagttactgttgcaatttcaggtgattgatcgatttgaccgttcaatgcttgtttttgtgcatcgtttaaatgcgtcatggcattgacagcatctttagcattttgtttttcagttgccaatttagcttcaccgtttaagccatttttagcatcagtcacttgagttaatacacgagtaatatcatctgggttaagcgttggatttgtcgtttgattgataataccttccgcttgagacactgcatttgtatatgctgtttgcttatcggcatcagcatcgtggtagttttcacttgctttgacagtatctttatttgcaataccttgtttcaagttactcattgctgtattcacattttgtgcattttgtttagtttgttcaactgtagctaacgcttgtgcttggttgatttgattacgtaacgcatctcgttgtggttgatttaagtcacgtaacgtatcaagatttgctaaagcatcttgtttcgcttgtgctaatttttcatcaccgtttaatgcatctttcgcttgattcattgtagtaactgcttgtgttactgcgtcaggcgtcaatacaggtgttggtgtgccatttgcaatttgttgcgcttggttagctgcattgttatatgcttgttgtttgtcttgatccgcttgtgtaaagtcaactgattgtggtacttgactgtttgcttgaatttgttgtttcaacgtacccattgcattatttaatgcatcagcattttgcttaatagcattaacacctgtaacaagttctgcatgtgtcacttggtcttttaatgctgttttttgtggttgatttaagtttggtaactgatcaatggcagtattcgcattgtctttagcaacttgtaagttatggttaccgtttaagccatttttagcatcagtcacttgttgtaacgcttgagccacttgttgtggatccacgtttgcatttggtgtaccgctaatgatttgttcagcatgtgctaccgcattgttgtaagcattttgcttttcagtatctgcattgacaaagttaccatttgctttagtttggtctttatctgcaacaccttgtttcaattgtgtcattgcttgatttaaatcttgtgctgtttgcttaattgtatttacatttgcaacagtttgcgcagcatcaacttgttgttttaacgcatctttttgcgcttgatttaaatcattcgcatttgtaataacttgtttcgctgcatcttttgcacggtgtacattgtcattaccattcaatgcttgtttcgctgcgttcacacgttgcatcgcttgttccacttcagtttgacttgcattgctgccatttgctttagataaaataccttctgcttgtgcaaccgcattagtataagcatctttcttagctttatctgcatcagtaaagttaatgctatttaatgtctcagttttatcttgtaatgcattacttaagttagtcatagcattattcagattttgagcattttgcttaacattattaactgttgcaatatctggtgcttgttcaacttgtgttgttaacgcttgtttttgagcatcatttaaatgatctaatgtaccaagatttgtcttagcagcttgtttggcatcagctaatttttgattaccgttaagtgcttgatttgtatcattcactttagttaatgcttgttgaattgtatttggatccattgttggatttgttgtttgttttaacaattcttctgctttagttactgcattgtcatatgctgtttgcttatcagtatcagcatcatgatagttttcgctacctttaatttgtgctttattcgcgataccttgtttcaattgtgtcatcgcgtcattaagcgttgttgccgcttgttgaatagcattgacgtttggtacaagcgttgcttgcgtgatttgtttactgtattcatcacgttgcgcttgattcaagtttggcaattgatcaatagcatgttgaacattttgtttcgccgttgctaagttcgtattaccatttaaatcatttttagcttgcgtaactttatttaacgctgcagtaatttcgctaggtgtaacgacaacatcaggcgtaccactaattaatgcttcagctttcgcaactgcttgtttatatgcattttgcttatcaggatctgcattgacaaagttaccatcagcttttgtttgctctttatctgcaatgccttgttttaattgtgtcatcgcattgtttaactcttgcgctgtttgtttaacattgtttacaccagcaacagttgttgcattttgtacttgttgttttaatgcatctttctgtgcttggttaagatcattagagttatttattaatgctgttgcttcatctttcgcatgttgaacgttggcattaccatttaatgcttgttttgcagtattaacttgttggattgcttgttcaacttcagtttgtgttgcattaccaccattagcttttgaaatgatgttttcagcatttgtaacagcagtgttatatgcttgttgttttgcttgatctgcatcagtgaagtttactgttgctttcgtagcatctttgtcagcaatcgcttgtttcaagttacccatcgctgtatttaagttttgcgcattttgtttaatttgatttgcttcatcaacagtatgcgcgccattaatttgattagtaacagcttgtttttgcgcattatttaagttgtctaatgaacctaatgattgtgtcgcttgttgtttcgctgcttctaggttttcattaccatttaatgcatttttagttgtgcttacttgtccagcagcttgattgataacagtcggatctaaagttggacttgtagtttgatcaataataccttgtgcagttgtgacagcattattgtacgcatcctttttattcggacttgcatcagtataattttggttttgttttgttgtcgcattatctgcaatactttgacgtaatttgtccattgctgcatcaacattgtttgctttttgttcattaccttgtgcttctgcaacagtagtcgattgttgtaccaattgttttaatgcatctttttgtgcatttgttaaatggcttaaaccgtcaattgctgtattcgcatgttgcttcgctttttcaagattttgagaaccattaagcgctgctttcgtcgtattcacttgattcatagctgcttcaacttgatctttaggcacgttcgtacctgtagatttatttaaaatattttcagcattacgaaccgcttcattgtatgcatttttcttctctggatctgcatctgcaaagttttgactgccaagtgtagtgtctttatcattcaagctatttttcaagttacccatcgctgtattgagttcctgagctgtttgaatggcttgcgttacttcagctacagtgtgcgcttgattgatgtttccagtaacagcacctttttgtgcattgtttaagttatctaacgtagataatgtttggtttgcattgtttttagcatctgttacttttctatcaccattcaacgcttgtttagtagttgttacagttgaaagtgctgcttcaacttgtgattggttctcattagtaccatttgcttgattaataatattttcagcagcagttaccgcattgttgtatgctgtttgtttttctggatctgcatctgtaaagttaacactttgtttcacttgatctttgtcttggattccgttgattaaacgttccattgcttgatctaattgttcagctttagttttcacttgatttactgtgctaatatttggtgcatttgtcacttgcgtatttaaatcttgcttttgagcattatttaaatgacttaattggttgatgttagcagttgattcttgctttttatttgctaagttttgtgcaccattaagcgctgttttgttagtgttcacttgattagctgcttgtgttactgcagatggatcaagtgtcggctgactcgttgcattaatgatattttcagcacttgtaacagctgtgttgtatgcattttgtttatccgtatctccatcaacatatggttgactcgcttttacttcatctttattcgcaatactatttcgaagttgattcattgcattatcaagatttgttgcattgtctttcacactttgaacgccagttacttgtgtcgcgctatcaatttgaccagtaatactttgtttttgtgcattagataaatgtgtcatttgacgtaatgcatctttagcttgttgcttcgcagttgctaagtttgtatcaccgtttaaacctgtttcagcattattgacacgttgtgttgctgctgtaacatctgctgcatttgtaatcacattaggtgaaccatttacaatgtttttcgcagcattatatgcatcagtgtaagcaccttgcttgtcaggactcgcgttagtgtaattaccaccagctacaattgtgtcatgatcagcaattgcttgttttaattgatccatcgcactattaagtgatgtagcactatttttcaaatcagttacacctgatacacgttgtgcagcgtttacttgttgttttaatgctgttttttgtggtgtgttcaaatgtgtcaagttatcgatagcttgtgtagcttcagttttagcgcgttgtaagttcgcgtcaccgttcaaagcattttcagtagatgttacactttgaattgcttgttcaacagcttgcttatctttattcgcaccatgatctttatttaagtaagattcagcttgtgtgatagcattatcaaatgctgttttgttagttggatctgcgtcgatgtagttttcgcttgctttagtttgatctttatttgcgattgctgactctaatcgttgcattgcgccatctaagtcttgtgctttcgttttaacaccatttacaccgttgactgttgttacaccttcaatttgtgatgttaaatcttgtttttgtgcattatttaagtgtgttaatgtacctaagtttgctttcgcatctgattttgcttgtcttacatttgcatcaccgtttaaagcatttttagcagtcgttacttgatttaatgccgcttcaacttgtgctttcgtcatattttgaccgtttgctttatctaaaataccttgagcattcgtaacagcatttgtgtaagcatctttcttaccttggtcagcatctgtaaagttcacttgttgtttaacagtgttttggtcattaataccattttgaagttgacccattgctgtatttaactcattagcagtattttgtgcagtagttacgcctgctactgtcgttgcattgtcaatttgactagttgctgcagttgattgcgcattattcaagttactatatgaagctaatgcatgtttcgctgcttctttagcttgagcaactttattatcaccattcaagtcatttttagcttgattcaattggttaagcgctgcttgaacttgtgtttcattcgcgttgctgccattggcattagtaattccttctgcttgtgtaactgcagtgtcatacgcttgttgttttggttgatccgcatctgtgtaattgacacttcgcttcgtattatccttttcagcaagtgcatgtttcaaattacccatcgctgtgtttaacgatgtcgctttatttttagctgctgttacagctgcaaggtttggtgcatgatctacttcagcagttgcggaagtttgttgtgcgttgtttaagtctgataaacgaccgatatctgatttcgcagtttgttttgcttctgctaatttttcatcaccgttcaatgcagaattcgcactgttcacttggctcgctttttgattaattgtatctggattcatttcaggattatttgatgcgctgataataccttcagcttcagatactgcatggttgtatgcattttgtaaatctgtattcgcatcatgataatcttcgctcgctttagtcgcatctttagatacaatactttgtcttaattgattcattgcttgatctaaagtaccggcattagcttgaataccttgaacaccagcaacagtcgtaccgcgttcaatttgttctgttaagtttcctttttgagcatcagttaaatgtgacattgtcgctaattgttgtttagctgtgttcttcgcttcatttagtcgcgcgtcaccatttaatgctgttttagcagtattcacacgttgtaatgcttgttcaacggctgctttattgtcatttgtgccagctgttttatctaataacgttttagctgctgttacagcatcattgtatgcagtttgtttatcactatctgcatcagtatatttctgagctgcttttgtagctgcttcatcattaataccattttgtaagttgctcattgctgtatttaattcagatgccgttgtagacacttgatttacacctgcaactgttgtcgcactatcaatttgtgatttcaacgcttctttttgtgcattattaattgatgttaaattatttaatgcatttttcgcagttgtcttagcattcgcaacattttgattaccgttcaaatcgtttttagcacgttgtacattttgtaacgcagtttcgacaccgtcttttgcagtatttggaccttgtgctttatttaaaatttgttcagcttgcgtcactgcatttgtatatgcattacgtttcgcttcatctgcatcagtgaagttaacaccttgcttaatcgtattttgatcttgaataccatttttcaagttcgtcatagctgtatttaatgcgtccgcattattttgtgcttgtgttacttcattaacatgcgttgcaccctcgatttgacgtttcactgcatctttttgagcgtcagttaagtcacttaagccatttaaatgttgcttcgcatttgtttgcgcagttcttaagttttcttgaccgtttaacgcttgttgtttagctgtcacttggtctttcgcttgattgatttcttgagcattcattgttggactagttgtttgaccaatgattgcttttgctgcagtgactgcactatcgtattcactacgattattaggacttgcatctgtgtagttttgacctgctttaatcgttgcttcattcgcaatgctatctcgtagacctttcattgcagtgtttaatgtttgtgcattatcacgaacagtttgaacatttggcaacgtcgtcgcttgacccacttgttctttaagttttgctttttgtggaccatttaaagaagttaaaccatcaattgctgtgttcgcattttgtttcgctacttctaaattatgattaccgtttaactgcgtcttcgcattcgttacttgcgttgctgcgtttgtaacatctgatggtgttaacgttggtgttggtgtaccactaacgatattttctgcagctgtcactttttcatcatatgcttggcgtttattcgcatcagcattgacatagttaccactagcttttgtgtcagctttatcagcaatggcacgttttaaagctgtcatcgcagtatttaattcagtaacagtatgttcaacaccatttgctacagatacgcgtcctgcacttgttacttgtgcttttaatgcttctttttgttttgtatttaagtccgaagcatttgtaatcgctgtgttagcagcctgtttcgcacgttctaagttttgaataccgtttaatgcagtatttgcttgtgtaactgtttgcattgctctttcaacatctgctttaggtgtattgccaccagatgttttatttaaaattgttgctgctgcatttactgcttgagaataagcagttcgtttagcatcatcagcatcttgataattttgactttgtaacgtcgtgtctttatcacgaattgatgtttctaattgacccatagcaccatctaattgttgcgctttggctttaactgtattaacaccttcaacatttgttgcttgtgtaatttcattatctaacgctgtacgttgtgcattattaatatgtgttaatgtacctaacgtttgtttcgcagcggctttagcttcatttaatttcgcatcaccgttcaacgccgtcttcgtactgttcacattttgtaatgcttgttcaactgcagctttgtctacattttgaccactagcttttgttaaaattgctttcgctgcatttacagcttgatcataagctgatttcttacttggctctgcatctaggtatttctgagtttgtttagtttgtgtctcatcattgataccattttgtaaactgtgcattgcgttatttaattcagttgctttggcagtttcttgatttacaccagctactgttgttgcaccatctatgctacgcgttaacgcatctttttgtgcattgttaattgatgttaagttattcaagttgtttttcgcagttgtcttagcttgagctaagttttgcgcaccatttaatgcctgttctttagttgtcacttgtgatgttgcttgcgtaatagtatttgcttccatcgttgggttcgatgtttgattaatgattgcttttgctgcagtaactgcgctgtcgtactcgttacgattattcagacttgcgtcagtgtagttttgacctgctttaattgttgcttcattcgcaatactatctcttaagcctttcatcactgtattcaacgtttgagaactatttttaacagtttgaacgccatctaatgtagttgcactttgaacttgttcttttaattttgctttttgtgcattattcaattgcgctaagccatcaattgtattgttggcatgctctttcgcaacacgtaagttgttatcaccatttaatgctgttttagccgcatttacttgtgaagtcgcactatttacgtcattgactgttaatgtcgcattcggtgtaccattaatgatattttcagcgttcgtcacttttgaatcatacgcttgacgtttttcttgatcagcattgacataattaccgcttgcttttgttctttctttatcagcaatagctgctttaagtgctgtcattgcgccgttcaattcagttgcagtatgttgaacgttattcgcatcagatacacgttgtgcattgttaacttgtgctttcaatgcatctttttgtttttggtttaagtcatgtgcgttgttaattgtgttcgttgcatttgtcttagcttgagctaagttttgtgcaccatttaacgcagcttttgttgtattaacttgatttgccatgccattaatcgcattagcatctatatttggattattcgtagcattaattacaccatttgcattatttacagcagtattgtaattatttttgttgctatcagatgcatcaagataattttgacttgttttcgtcgtattatcattttggatacttgtacgtaatgcacccatggcagtatttaatgtattacctttatctttaacaccatttacacctgcaacattttgtgcttgttcaacttgatgcttcaagttgtctttttgtaattgtgttaagtgtggtaaaccattaatcgtatttgttgctgttgtcttcgcatttcttaagttttcagcaccatttaacgctgttttcgctcttgtaactgcatttaatgcattatcaacgtctgctttagatgtgttaccaccagtttgtttatttaaaatgccttctgccgctgtgacagcttgagtatatgcatttcgttttgattcatccgcatcaagataattttgatttcttaatgtcgcatctttatcattgattgaaccttgcaaactattcattgcgccgtctaatgtattggcatttgtttttacagtattaacgccatcaacagtcgtcgcttgattgatttgaccttctaacgcagtacgttgtgcatttgtaatatggtttaaagtacttaagttttgtttagctgccgctttcgcttctgctagtttcgcatcaccattcaatgcatctttcgtacttgttacttgttgtaatgcacggtcaactgctgctttatctgaatttgaaccagtttgtttatttaaaattgctttcgcagcagctacagcttgatcataagtagttttcttactttgttcagcgtcacgatatttttgagtttgttttgttgcattttcatcatcaataccatgctgtaattgacccatagctgtattaagttcatttgcagtttgttggatacttgttacatttgcaacacgttgcgcacttgtaacttgtgcttttaacgcatctttttgcgctttatttaagttagcagcaccatcaatcgcatttgttgctgtttgtttcgcttgcgttaaattatgtgtaccatctaatgcatttttcgttgatgtcacttgtgtagcgatttggttaattgcattagcatccatatttggattgcttgttgcattaatgacactattagcactatcaacagcattgttatagtttgttttgttactttctgtagcatcaagatagttttggccatttttcgtagccgcattgtcttgaatgctatttcttaacgtacccatagcaccatttaatgtgttggcacttgatttaacagtatctacacctgcaacattttgtgcttgttgcacttgttgtttcaatttatctttttgtgcagttgttaaatgttgaagtccgtttatagtagtgtttgcatttgatttagcttgctctaaattatggttaccatttagggcacctttcgcatttgttacttgtgacaacgcgttttcaacggcagctttatctaaatttgatccactatttttatttaaaatattttctgcgttcgtaacggcttgcgtataagcagttttcttatctgaatcagcatcatgatagttttcgctcgctaaagtattcgctttatcattaataccattttgcaacttagccatcgctgtattcaattgtgtgcctgtattagataccgcttcaacaccagctacagttgttgcttgatcaattttagttgttaagtcacgtttttgtgcattattaattgaagttaaattatttaatgcatttttagctgcattcttcgcatttgtaacgttttgatcaccattcaatgcatttttagcacttgaaacattttgaatagacgcttctacatcttgtttaggcgtatttgcaccttgcgttttgttcagaattgtttctgctctgcttaccgcatttgtatacgcatcacgtttggctttatctgcatcagtaaatttaacactttgtttaactgtattttgatcatggatagcttgttccaagttgcccatttgcgtgtttaactcagttgctgcatttttagctgctgttacctcactcacatgacctgcacgatcaatttgtgatgagattgcagatttttggttattagttaagtgtgataacgtatttaagttttgcttagcagtattttgtgcatttcttaagttttcagcaccgtttaaaccatttttagcattattcacttgtgttgcagcttgggtaatcgcactagcatccatagtcggattgttagtttgattaatgatacctttcgcatttgacacagcgctattatatgttgattggttattcggacttgcgtctgtatagttttgaccagctttgactgttgtttcgttagcaatactatctcttaagcctttcattgcattgttcaatgcttgtccatttgtttgaacagtttgtacgtcttctaatctattagcttgtcccacttgttcttttaatttagctttttgaggtgtatttaattgtgttaatgcatcaatagcagtattggcgttttgttttgcttcacgtaatctttcgtcaccatttaattcttgtttcgcgctgtttacttgattagctgcagctgttacttctgaaggtgttgtaacaaccgttggcgtaccgctaataatatgttcagcattggtaactttagttgtgtaagcattttgtttagtgctatcggcgttgacatatttactgcttgctaacgtagtcgtcttatctgcgatggcatgttttaatgtgcccattgccgtgttcagttcagtcgcattacgttgtacatcttgtgcattagatacgcgttgagcaccattagcttgtgcttttaatgcctctttttgatgttgatttaaatcagatgatccattgattgctgtaatcgctgcttgtttcgcattatttaagttttgcgtaccatttaatgcgtgtttcgcactattaacattattaagtgcttgttcgactgcagttttcgctgtattcggtccagtttgtttatttaaaattgtttcggcatttgatacagcttgattgtaagcattacgtttttgctcatcagcatctaggaagttttggctcgctaatgttccagatttatcgttgatagcggtttgtaagttgcccattgcaccatctaaactattcgcactttgcttaacagattcaacaccagctaagtttgtagcttgtgaaatttgatttgttaaatcattgtgttgtgctgtagtgatatgcgttaaagtacctagatgttgtttcgctgcgttttgagctgcaattaattttgcatcaccattcaatgcatttttcgcagtattcacacgttgcaatgctgcctcaactgcattttgcgcagtgtttggaccatgttgtttatttaaaatcgctttcgctgcagtaatagcattatcatactcttgttgtttatttgtatcagcatcacgatatttctcagatgatttcacttgagattcgttgttaataccactttgcaagttagccatagcttggtctagatgttgcgcattttgttttacagtatcaacaccactaactcttgtcgcactagtaatttgactaattaaattgttcttttgagcatctgtaatactcgtcaatgagtttaagtacgttttcgcattttgttttgcagcagctaagttttcatcaccgttaagtgccgttttagaactattcacttgatctgctttttgtgtaatcgtacttggattcatttctggattactatttgcattaataatcgtttcagcagcagctactgcgttgttatatgctgtttgcttatcattattagcatctacgtaatcttcacttgctttagttgcatctttgttggcaatactttgtcttaacgtattcatcgcttgatctaatgtattcgcatttgattgaaccgtatgaacaccagcgacagtcgtaccactattaatttgatttgttaaattcgttttttgagcaggtgttaaatgcgtcatattatttaactgctgtttcgctgtttgcttcgcttgatctaataaacgtgtaccatctaagttagttttagccgaatccacttgattcatcacttcagtaacttgatctttcgttttattttgaccatttgatttgtttaaaatatctttcgcagcttgtaccgcatttgtgtatgctgttttcttacttggtgtcgcatcttgataattttgactattcaatgtcgtttgttcatcattgatcgcaccttgcaaattacccatcgctgtatttaaatctgtaccttgttgtttaacagtatttacaccagcaatatttgatgcaacattaattttagatttaacatctgctttttgtgcattatttaaatgtggtaatgcatcaattgcacttgcagcatctgttttagattgtgctaatttttcatcaccatttaatgcatttttattagtagtaacagctgaagttgcactgttaacatcattaacagacatcgttggatttgttgtttgattaatgattgtttcagcacttgaaacggcgctattatatgcattttgtttagctgtatctgcatccgcataatcttctgtacgcttcacttgatctttatctgcaacagcttgtcttaagttacccattgcactatttaagttagttgcattttgcttaattgtattaactgtctcgatttgatgcgcaccattaatttgcgattgtaaattttgacgttgtgcattattcaagttatttaaatgtcctaatgcagtgttcgcttcttgcttcgcagcatttagcttagcttcaccattcaacgcatgttctttatttgtgacatttgataaagcattgttaacatcacttggtgttataactggatgttgtgcattaccgttaataatgtcattcgcatgattgtatgcattgttgtaatcatttttcttattagtatctgcgttgacataattatcactttgtacgacttgattatgattagcaacgccacgttttaaacctgtcatagcagtatttaagctttgagtcgtttgtttaatatcatttactgcttgtacattttgtgcactatttacttgttgtgttaatgcattcttttgcgcttggtttaaatcactcgcatgcgtaatcgcatttgttgcttctgttttcgcacgttgtaagttttgttgaccatctaaagcatcttgcgtcgatttcacagatgatgctttttggttcactgtgttaacatccatcgttggattattcgtttctccaatgacacctttagccgcattaactgcattatcatacgcttgtttattagcttgagttgcgtcagtataattttgacctgatttaatcgaattattatctgcaacactttcttttaatttagtcatcgcattatttaaagctgtaatgttagacttaattgtttcaagcgcagcatgattttgagcagcattaatttgttgcgtgaaattattttgttgtgcttggtttaagttagaagcaccatgtaatgttgataacgctggctgtctatctaatgttaaaccttgacgtgctgtatttaattgatccttagcttggtttgcctctgtcactttatcattgattttttggacagttgggttgccattcaacacttgattaatttcagttaacttttgacgcgctgcttgtaatttttggttgtacgcatttaacgaagcggtcgtcatacctgttgtatccgttggttgattaatgctttgttctaattgcgttttcgcattttgaagcggcgctttatctggtgttaacgcttgacgcgcatgatccaaatcagatttcgcttgatttgctgcagacgtatttgtattaatttgatctacagtaggtgaacctgctaatacttgattgatttgttgaaccttattacgtgcagccgttaacttcgcattgtatgcatttatagagtcttgcgtcataccagttgtacttgtttgcgtatcaatactatgttgtagttggtttttcgcattttctaaaggtgctttatcgactgttaagccattacgcgcttgatcaagtgctgatttagcagcattcgctgctgtcacgttttgacgaatcgttgcaacatctggatgagatgctagtacgcgatcaatttcttgaattttagttcttgctgctgaaagtttttcattaaatgtcgcaacagatgcacttgtcatacctgtcgtattcgttggttgatcaatatcattttgcaactgagttttcgcagtttgtaatggcgccaagtctggtgttaatccatcaattgcttgttttaagctattatatttttcttctactttagttttttctgcggcaatttgttggtctgttgcgtcaccattgttaataacattttgtgcatttgttgattctgtttgacccgcacgtttagcattttcatatgcttggattgatgattgtgtcataccatcagtagttactgatttattgatttcttcatcaagtttcgtcttagctgttcttaaagcactattatcagctaaaggtactaattgattaatagcttgcgttaatcgctcattgacacgatttacatttgttaatgctgtttgtacctcttgtactgatctaattggcttctgaatgatagcattggcactatttttagcacttgttaagtcactttgaagtgcacgaatcgaattattatacgcagtgatacttgctggtttcttaccagtcgttatacctgtgcgattcaattgttgcactgcttgctctaaggcatgtgtatctgcagttaaatcatgcttcgcttggtttaatgctgttaatgcgttatcgacacgacgtttttcatctgaaatttgttgtgcagttgcatcaccattatcaataacacgttgagctgcagttatttcagattctgcatcacgtttcttcgcattatagttatcaatactttgttgcgtcataccagtagtcgatggtacttggttcacagaactttgtaagttatttttagacgttactaattgactattatcttctttattttgaagtaatgctttagcttgatcaatcttagtttgtgctgcacgaactttagttaatgcgtcagaaacttgttgtggtgttgcacgctcattattaataacttgttgcgcttctgttttcgcagcattgatttgttgttgcgcattatgaattgcattattgtactgcgtaattgtacctggctttttaccatctgtactaactggatcatctaaatgatttttatctgtgattaactcacgtttatccgcttttgtgaaaatggactcttgtacttcttcagtactgctatcattgtaagttactgtcacagggatcgtcgttgtactaccaccagctaaattagtaggcattgctgtgccatttttaatcgttgcagtacgtttattagcaacttgaactgcattgttaatttcagcaggtgttacatttgaaccataatcttttacaatttcagttgtgttgacagtatgagttgccggtgcagttaatgtacttggattactacttgctgagtgacctgtacctgctttcggtgtaatggtaattgctgaattcggcttgatagtattggcattgaacgtcactttacctgtatgtgcatctaacgttacatagtcaggtttattggcgattgtccattggttattttgaccacgaacagcattaagtgtcttactatgttctgcaccattacccactttttcagtgtaagcaatatccattgcttgagttggattaattaaatgccctgatgggttattaggcatgatatcaatatgaccattttgccaaatcttagtagtcgcttggttcggttgaggtgcgacaactgtgaaatcatcactaagttgttcgtcgctgattgtttcaccactaccttgtgttgcaacaacttgaattgtatcagcagcattgaaagtaccagctgcaacagttataccattattcgttccaacaatacctgctacagttgctgcagatgcttctttcacccatggactcgtattattgtgacgtgtaaatgtcgtcacaacattaccattacgtttaataactaatttatcagcgtatgttgttacgttaccggcatgtgtattcactgtttggtttgctccaggtgcaatcgtaattgctcctgctgccgtttcagtaacagttggtttcgctggttggacatcttttactacaaacttcgctagtagagatgttgcaaatgtatgtccattatagatgacatcatatttcgcattaatgactttagccgcattcggtttattcattgctgcccagtttgcatcgttcgtacctgtagtatcacgattccatttatacgtaaatccatctgttggtaaaccattagcattttgtatatgtgcatatcctgatgcttgcgtaccacttgctaaagtgccaccaactgttgttgtataagaagtttgagggaattcaaattgatatacattaacagtaacaggtacacgttttgcagctgaaatacctggatatgtcacatcgacatttaaatgttgaacacctgcttgttggttatttggttgttgtctatttgcccatgctgcagtgataccatttgtgtttgtatttggatcaaatgtaatgtagtttatcgcatccgttccattagtcaaattttgacctttcacatcacgtgatggcgccttagcattagcaactggataaactttgactggaacttcaacattacgcgtaccttgaccactaggtaatgttacaaccgcagttttatgagtgttaccgactgtattcttccatgtatctggactatcatgccatgcaaccgttgccccatgtggcggattttgaataaatctttctacgtgtccgaaatcaaaaccgtcgccacctttaataaatacagcgccttcagtagttgcttgtaattgtggtgtcactgttactgttgcactgtcatttgaatcaacagattcatttcttgttacatctatcgctcgaccatgttcatcttgagtagtgtacgtcacattattcattgtgatagaagaccttgccttaatcacaccatttggtaacgcatcacttaccgttacaactgcagtattaccactaccataagtcgtgtttgtaatcgttaatggcgtattatctgctttaaataatttaatagatgaactacttaacacattattaattttaatttgttggttagtaagacctgctttataagtcacagagttgccatcaattcgcggtggatctggtttaacttttgctaaaatcttgataatttgcgtttggtgattatcataagtaactcgaatatcccttgttgaaataccaaccacatctttacttggtccatatgaatttgtaaattggaaattcatacgttgcgcattttgtgtccaagaatcattaactggtttaacatattgtttcgcatcatacacatcagatataccagggaacacagcgcctctattcgtctcaaagacatgcttcggtactgaacttactactttatatgttgctgttttcgtaattggggttgtttcaccatcaattaagatatgtgcagttacattgatatcttgacctatagttgtgttatttttgtttggcgcttgaccacttacccatgttatcgtcgcatctggaatggcactaccattcgataatttaaagtaatcagatgcacttgctccattacctgttgggaaatcttgcccttgtacagtgtaatgcgaatgtgcaacgatttctggaataacatgctttacaggtacagtcactgttgatgttgttccatcttgataagtaacagttacagttacttgtgcgttatttcctgtacgactcacattactcactgttttactagtgatttcagatgcacttgctgttgcatagtttctatttggtgcattgcttgtaaacgttaatgaattaataattgctgtttgatctgcttgcgatactgtcgcattattcgaaatattggcaattctcactggattagcagccgttgatgatgttccaactcgatatttatcacgtaaaggtttaattgtgacattgaatgacgttgttgcagtattaccgcttgtatcagttgccaccaaattaattgttttatttgtagctgatgtcacatttggtgccgttgctgatacatgttgatggttattatcaacagtgcctgtcaattgtgatgtatttgggacagttacagattgcacaccaaagttatcattcgctgtaatcgtattggtaaatgtttcaccagagaatacttgatgatttgtgtaattacctactgaaacagttggatttactagatcactaggtacaaaataaatgttaatagcatcagtagtatttcccgtattttgatttaaatgttcaacatattgttttggaccatatggcgataagtataactgcgctttatataccgcatcagctgcattatgcgtagaattattttttactacatgatcaattgtaaatgctccagcaccattagctgctgattcattaacactaacgacagtcgagttactgtggttcgcacggacatttgaatttgtaacaggttgcccaccaaatccatttgaaggattaataatatccattatttgaatgacttgaccattcaacgtaaattgtcgttgcccatcagatgttggatttgattgtgaataaccagttgttttatagtttggtctaccaccagcttctgcttgtgctttttcattaccagcaatgttattacgtaatccaggcaccgttgttgtcgcttttaacaaagttaaaatatcattcgtcgtaatttgcgtacctaatgttgcatcatagcgataaattaatgatttatgatcatcagaccatgataaaccaccatcagtcggtctatttgcaatttttgcatttgtccatgtcactgtataatcttgcgggaagttaacccagcgcaagaaattcatattagcaaggtttgatgtaaacgatttcgttaaacgacctttattaatattgacagtaatggtactcacgttagaaccattaggtgtatttgttactgaaatatctccttctgcaaatgaaatcgcatctctattggcattgataaatgcttgtttcacttttgaaatttcatcagtagttatatcatatgttgacatacgatatacacgttgatcaccttctggttgtttcacatcaatgattttcaaagtgatatagaaatcttcagtgtctttatgatacgcatttgtagcagttatgtggtatagctgtgtaccagcgttcatttgactaacttcttgtgcagttggaatcgttctatccgatgtaatgtttgtaaatgtactgcttggaatcgcttgtccattacttaaagtgaaatattgcttaatatctccaatattaaatgattgtcctttagcaattgtaaccgttgccgttttaggtgcattagcagtttgatattcaggcttaacaactggttcgtatgtcatcacgtttgtcgcatcaagcgtagttgatgacccatcacgatattgcaatgtgacattaccatgattatctactgtaactggatttgatgaagctaaataacctcttatattttggtttttattcataaacgcagtagtaatacgttgcttttcatcaccagttaaagcagtcggatttacaacgacaactttttcagaatttcctaagacaattggatgcgcatcatcactaattttacctacatgcactgtcacatgtttagactgactatcattcgtcgtattattgacattgtcggttgctgacactttgaatgtaatatcactattataagcctgattcatagagactctacctgaaatagctaatgagccgtttttcttgtcggatttagttaaatttgatgtccaaccactcggcaatgtcgtaatagttgtactttttaatccagaatgtctatctgaaacccccatagtaaagctaacttcatcgccacgataatatttcgcatttaaaccaactgggttattaattgtcggtggaatatcatccggtaaaattgtaactgcattactcatatttgaggcaactacattattgtaaaatattaacgccctaatttgatgacctaccggaggtataaatactacataatcttctggtcgtatcgttatcgttgaatgaaccccatcaggtgtacccgtcgcaatttttgtataacctgatggtatttgatctgcctcagaaccaccatcttttgtttgagacgtaggtataactaaatatactaatgcagatggatccaatggaatatccgtaacggttacaggtaccttttgtaatgctgtacctcttaattcttctgctgttgtagtaattctaggcgtatgtggcttaacgcgaatctcgaataattgttctttacgtccaaatcgtattgttccaaagtaatcgcctggtaataaattaccaaccagttcaatgttacgttctctggcattattaggtctatttgttgaattctcaatgtgtaatgtacgtggaatacctgtaatttgccaatctttatctgtaaagttttcattacttgttaaattaatacgtagcggttgtatagatgttacactaccacctaagttcactgaagcattcccttgattacctgcatatacatagaaaaccggatgtccagcttgttttgaagcaggtttttcagcaatattttgaccatcatcatttttaaagaatttaatgttatgttgaatttcaggtaatactgttaaattaacaggcactaaagtttcaccgttaccaaaggcatcaggatagtcgaaaccaatcattaatcgtattggatttttagttcttgctgcttcttgaaaattttgatcactaaataattgacttaattgataatcatttaatggattgactccaccctgtctaaaagcgttagtgtttgcattagttggataaaaacctaatactttattacttggtgtcttaacataacttaatggatcatctacaaaatcatctatatttaggttcgtactttctaataccttttttgtttgtacatttccttgactcacttctactcgtttagttgtacctatacgataagtacgattaaccacttgtcttaaaccattaagacgttgttgctggtcttgtgttgattcgacatataactgactatacataaataattgattgtattctaatgcacgagcaccggcagcataatacaatttatcaattgttggaccttgcgttttaaatgaaatcgtataactcgcatcaccttgaccgatgaaagtataaacttttggtacaccagatgattcagcaggtttttgaccattaatataatcgaatatttgtctaccaaaagctttagtagcaggtgttgctccagcttcatttaaataatcacttgcacgtgctaaatcgctcaagcttttaatattgacagttggccattcatatattacttgcccgcttctatttcttattttaaagtcatgtgaacgatggggatcatttacaccgtattcccacatttgtggaagtggtttgttcgcaccggctcctgcaccattactccattgtacatttgtaccgtctgcattcacagttacaaactccgttctaccaacaggagtttgtccgtctggtagtgcaaaccagaaaatcatattttcatgtggtgcgtgacctttgttaaacttaatcacccattgataaccgtctccagtttgctttgctgtgataagtgcaaattcttttgcgtctgatgcttttaacgtattccatggcgtagtaggtaaattatatggtgcccccttactagaagcattaatatatgtacctacaggatacccagaaccatcattagcattttcaacataatatgatgagtttgcgttttgatagtctgatactgatcttggttctgcagctcttgattcaatcgaacgcgtttgaattctacttgagcgtcgacttgtttgttgacgttgaggcattgtacgaattaaagcaacagcttgttctaattctttatatgcaagttgcaagtctttattgtttattggatcattactacctaataacgtattgatcttgtcaaaaatgccttttacatagttaaatgtcccagaatctgcattttcgcggtcaataaagcgataatcatggtaattagcatcaaaaaatgcttgtaattcattacgatcgtgttgtacgttaccactatctgatgaatctgaagctgtgactacatttgcttcatgactttctacatgtgttgcttcattgtcgttttcctttttgttagcagcacgactttcgctttgttcatgcttacttgccgctttagccgattgtgttggcgtagcagctgccgtatctttctttgcttgctcattttgagatactggttggtcatgttctgttgtagatgattgtactgcactagcatctacatggtttgtttgattattatttggttgttcattttcaataggcgcagataatgattgaccattttgtgaattttgaacttctacttctcgattctcagtctgcgtatcaccattttgttgtttctgttttaatgcactagctggttgatttgtctcagcagcttgtgcttgtgatgtgtttaaccctagaaatactaacgtcgcaatgaccgtcgagaatgttccaacggtatacttacgaatactaaacttttgaattttatcacgataattcacagctattgttcactccttatcttgttgttatgtctctgttgtgttgtgaatgtatttacatttgattgcatgtgtattgtaatgctcattccattctcatttaaaaatttaaaacaatgacgattcaatacaatttcgcaatctatctaaaaagtattgaaatacattacaactatgtgttgaacaatttatttatgctccagaatataataacacaaaatatattgataggtaaattgaatttgtgacaatttataataattataaataaagtagtgtaaaagggtaataaaaaaccgaccttatgtagaatcatttataatgattacacataagaatcggtttatatttttgtttaatattgtagcgacctttatgatttcaatttaattctcaattatcataattgagtgtcgttttgtttaggcacaagtaacaaaatgataacgaatgataaaattcccatacctgcgtttaaccataatgcaatcattgcaccagtataaatgtttgtcatatttgatacgattgcataaactgcaccactcaatgcgacgccaaatgctccacctaatgcagaagccattttatagatacctgcagcaacgcctactttttctaacggtgcatttgcaattgctgtatctgttgatggtgtagcatatattcctagtcctaaaccaaagaataaataacctattatacaacaaatgacatataatatttctggcaagaaagttaatgaaatgagacattctccgacaataagaactcctgttccaattagcattggtttcttgcatccgagtgtttgaagtaacttttcaccaacccgaatcataattagtaccattactaaataagtgattgataaacttcctgcttgcaaggaagaatatcctaaacctctttgaacaaatgtgttggctactattaacgttcccgcaacaccatttaacaaaaagtttgaagctgttgcacctgtataagctttatttttaaataatttaaaatcgattaaaggatttgtagcacgcttttcaagaactataaataaactaaaagatccaattgcaattgctattaaagtgataaaaagaagtgaggttacacctaattctgaccctttagtaattaaaatatttaaactgaggagcataatgactaaaagaaccagacctttaatgtcaaatttatttagagaaatcgatttagatttagtttcaggtgtgcctttaataagaaccagcgcaattaatgaaattacaattgataggatgaaaatccaacgccaacctaaaagcgttgcaactgcacctccaaaaaatgaacaaacaccagagccgccccatgagccaattgaccaataacttaaagcgcgttgtctatctttcccaatgtaatatgacttaataatagacaaagttgcaggcataatacatgctgttgaaagtccttgaattaatcttcctataataagtaataaaggaatatttgaaataatgattaataatgaacccaatatatttaagataataccaatgttcgtgagtttaattctgccatatttatcagcaagaccacctgctcctactacaaacattcctgaaaataaagcagttatactaacggcgatattaaccgttccaatatctgtattgaaactatcttcaagtattggtacaacattaaccaatgattgtgcaaatagccaaaacgttattacacttaaaacaattcctattaacaacttattattgccttcaaattcctctcttgacggcttttccatctctatttgcctccctatacttttgaaaaacagacaaattccataacagaaatttgtctgttcgatagaataattgaatggtttttgattttaatgtgcaaacctttaaatttattagtagtccatccatttattctcaatgctagttatcttaccttatgctgctttttgtttctttttatagtaataaactggtataccaagtgctgtgattagaatcccaataattgccaatataaattgtgtaaacagtgtattaattaatacaaatgatcctgccaaaatagcaattaaaggtatgattggatataacgggactttatatggtcgctccatatttggttcacgttttcttaaaattattaccgcaacaaacgacatacaatagaacaaccaaataacaaaaattaacatgtttgtaattgtatcaaaggcacccattgacatcatgatgatagcgattataagttgtataattgcgccaaaccatggtgcgccagattttgttaattttgcgaataagtggctaaatggcaataattttctttcagccattgcatatggtacgcgcataccagtcatagtatagccattgatcgtaccataaacagaaattaatataccgattgtaataatcttaccgccattttcaccaaataatatttttgatgtatctgaagctgcatttaaattaccagcaagtagttctattggcagtgttaataagaatgtagcgttaattaataaatacacagccataatacaaccgataccaactgaaatcgctaaaggtaaatcgcgtttaggatttttaagttcccccgcaacatttcctacatgaatccaaccatcatatgcaaacatagttgctaataaaccactaccaattgctgtaaagaaaccatttcctgaattacctgtagttggaattaatgaaaaagtgatatctccagattgaaatataccaaaaattacgataacgatgattggaatcagtttaattactaatgtaactgattgtaaaattccgcctgcttttgaacctaggaaattgatcaacacaatagataacgcagatgcgattgctatcggtattaacgaacctatagataaatggaataaattaattaactgtgtcgcaaatacgatagacaatgctgctacgttagctggaaaataaataaatgattgcgcccaacctgataggaagccccagaaatcaccgtatgtatattctatatactttgttaagccacctgtttcagggattgcagcagcaagttctgctgctgttaaccccgcacaaatggtaatgatgccgcctaggaaccatacaaacaaggccattcctgctgttcctgttacttctgttacgtttgatattttaaagaatactcctgaaccaataactgtccccataacaatagcaaacgctgagaagaaacctatatttttttgtaattctttaccatttgacataattacacctcatttttaagattaaatgttttaacctaccacacccttgcttgtatctgcaatattcagtccatgctcaatgacacctgaaactctagttaagtcaacattcccgcctgaaactaaagcaacaacatttttatcttcaagccatttattgtttatttttccacttaaaattgcagctgttggtaatgcgcctgcaccttcagtaataattttggcacgctgcattaaatctttcatagcatgttcaatttcttcttcagtaacaagaataaattcatctactaaatgtttaactacttcatatgtttgttcaccaggaacttttacatcacaaccatctgctattgtgctatccactcgatgttcagttaaatctctcttatagaaagattcagccataccatgaacattctcagattgaacaccgataatatgaattgaagggttaaatgattttaatgcggtggcaatacctgcaattaatccgccaccgccaactggtacgatgactgtattcacattccaaatatcatctaaaatttctaaaccaattgttccttgacctgccattacaaacttatcgtcatatggatgaacgattgtcatgcctttttctttcgctaattcttccatataaagtctagtttcgttaaagtttttaccttttaaaataacctttgccccatagccttttgttgcttgttgtttcgcttgtggtgctgtttcaggcattacgatagttgcatcaatgcctagtaatttagctgttaaagcaacaccttgtgcatggttcccagcagatgctgcgataatgcctttttctttttgttcatctgttaagtgattaattttattgctagctcctctaaatttgaaagatcctgtgaattgcatattttctaattttagaaatacatttcctttagttatactttggcttaaatacatagatttaattagaggagttcgacgaataaatggtttaatgcttgctttagcttcttcgatatctcctaaacttacaatgtgtgctgtttgtaatgtaactgtgttggttgtcataataattacatccttccgttttgtaaatttttagtccaaactataatgctatatttaaaatattcatttcactcaatttcgtttatattactatctattcaataacatttaatatttctttataatctaggtcatgtgatgtagctaatccttggtttgtcacttgtccttggtaaatgtttacaccagtacttaaggcttcattatctttaattgcttgttctaagcctttgtcacaaatttctaatatataatcaatatttccttgtgctaatgccattgttgacgttcttggaactgcacctggttggtttggtacaccgtaatgaattacgccttcttcttcatacactggatcagaaattgtagttggtctaattgtttcaatagttccaccttggtcaatagctatatcgattaatactgaaccttttttcattgatttaaccatctcacgagtaaccaattttggcggtttcgcacctggaattaaaattgtagaaataaatacatctgcttttttaatttgttctgctaaattttctggtgttgatttgactactgtgacatctttttctgcatacatgtcttgtaaatatttaatgcgatcatcgtttaactcgataatgattactttagcatttagtcccaaggcaacattggctgcatttgttgctgctacgccaccaccgaaaatcacatatgtactaccaggtatatccacattttcatgtacaccagtcactaaagtaccttgaccaccatgttgtgcttcagagtagtaagctcccataattgctgagcgttgacctgctatagcactcattggcgctaataattcggcttttccattttttataatggtttcaccactaatcgcagtaacaccaacttcttgcattttttctactatttcttttgaagatgctagatgtaaaaatccccagatgatttgattctttttgaaatattgatattcgctttcatgaggttcttttactttgataacaagatctgcttcccatgcttgttcgtgagttacgatcttagcgccttctttttcatacatatcgttagaaaatcctgaaccaatgccagcatttttttcaacaattactttatgtcctgcatccgttaacttacgcacattttcgggtgtgcaagctacacgtccttcaccttgttttaattctttgactactgcaactaacatttgcaacactccttttgattttgtgaattatttcacaatcattttatcttgtgggtatgcatatgtaaataccattaattaattattcatattttatctataatttgttaataaatatttaatatattattcttattcttaaatattatgtgcaattataccactatatttatttcttatactccatttgatttatagttgtattaatacattgactcaaaaactaattaatcaaatatgttttttagattaataaagttgtaactgtactattttgtagtgtttggtaatttatttggatgaaatataattctttaaactctattgattaatcaaatatgtatctatcaaaattcggcttatttattcactctgacatatccaaatacgcaaaaagactatttctaccttgtatcgatagaaatagtctttttatacttaattggtttaatttttcgtaaaaaattatactctttaaaaatgggatgaaatatattttcctgaaacatgtaattcatgttcgttacaaattgataaaatatggttaagtgtcgttgcaaatgacattttctcaaaaagcgcttcactatcaattggtacttgtgtgtgaatttcagccagtcgcttcgataaatatagttcatctaaattgtcattaatcttattacgttgcccagctgataatgcatcaatgttttcaaccacattttcaacgctttgatattgctgaattaacttaatagccgttttctcaccaattcctttaacacctgcatatccatctgctgtatcacccataaacgctttaatatcgattagttgttgtggttcaagggcatattcttcgttaaaacgatgtaatgtatatctattataaatgttaaaaccttttttaattagccaaacttcaacattgtcattaatacattgcagtaaatctttgtcgcccgtaataatatagacatcgttatcagttgaatattgttgtgctaatgtacctataacatcatccgcttcatagtttttaacgccaatatttacaaagccaaattgctctgaaatttctttaacataatcaaattgtggtatcaattcttctggtggtgcagaacgattttgcttataaccatcaaacatatcatttctaaaagttgattgtcccatatcccaacatacagctacatgtgtagggcgtatttcatgtattgccgtaaagatatgacgtacaaatccttgtattccatttgtaggtacaccttgtgaattgtacataaattgtttatgaagacttgtagcatagaaatgtctaaataatagcgccataccatctacaagtaatattttattaggcatttaaaacgttccttctttcttaatataaaatagttttcagttgttgatgtttatctttcaattgattgataagtgttgtatctaaatcaaatgctaataaatcgtttatttgtgtttgaatattagcttcaaaactttcaaattgcgattcagcttctacagccatttgctttacatataattcaagttgttccctcaataatcccatttgtggttgtaataatcctaacgtactttgacaaattgattcatgtatatctctttgcccatttggattcaaaattttacgttttgttaattgtttaggcaatgcatttagcatatcgttgaaatcgatgtgcaataatggttgctctatattagctgattcaaagttaaactgaggattaacaatgacatgtaaatctgctaattgttgaacgattggtgcaatttgctcagtaagtttcttattaaagtatttttttatacgttctgtaattaaagattgctctaaaaacaatcgttgatgaatttgatctaagtatactctcgtagacactttcttttcttcattaaaatcactattttgcgtcatttgagagttaaacactgatttaacatcgtcaagtagttgtaattttaaacgtgcatttaaatgataaacttgttcttcaacttcgttgtctgtatgttgtagcgtcgcatcaattaattgatgttgtaaacgctgtttatctttatagactgttaacctttgttggcgacgtgtaatatcagctttatttgtttcaaattctgtaaccatctctacataagaacgatccatttgttgaagctgatgaatcatttgttgttctaaaattgatttagattcaacatcaacaaattgttgtatgctttgttttaattgatcaatgcccttatcttcagcttgcaatgcatttcgacttgatacagcaaaaatgtctgattgtaagtttacttgtcttaatgcatctgatacatatgtttcaaccgcttcaagatcatcttgactttctgctaaatcagcagcattaattaccattttaaatgcttggttttcattcaactggttcatatctttcatatgttctataaacgccttgtcattatcagtaaacgaatgattaaaataacttacatacaagattaagtctgaagaagttaaaatttgctcggtttcatttgtatgcctttggttatttgagtgtagccctaatgaatcaacaattattttaccttttaaccaatcatgcattaatgcaatgtgtactgttttaacaaatgttgcgtattcatcttctgcactccactttttcaattcctgttgattaatggcatgtttttctccattttccaacatattgacatacaatttataatgtttttcaactgcctgaataaaagcgagttgatttttatttaaatgtgattttaacttttctaaatctgaattaataaattcttctatagtcgaataagacatatcttggtattcaactactgcattaatttcatctaataattgcgattgtgattttagcgttatataactctcgtctctataagatatttctgtagtagctgctgtagtaggatttggagaactgactaaaatatgctcgcctaataatgcatttatcaaactacttttaccagcactaaatgttccaaatacacctatttttattaatttattatctatacgtgttaatgtttcgtggatatcttgctttgtacgcttgaacaaaggcacatccgaaattatatcaagcgctttttgaatatctatagacatatttgttgtagctgtattttgatttagctgctgattatcacgattatcccgagcattatcagtagccagttgatatgttgtctcttgtcgacctattaatttatctagagattcatctaaatgaatatagtagtgacgataatttttagtcgtcaatgactgacgcagctcatttaattctgtataacgttgatattcttttaaatcatcactttcttctgttggtaattcatctgcctgcacattttctattatttctttaaaaattggtgttgattgttgttcaacatatttcttaatggctttaaccacttcgtctgaaaatgtaagtacataagtattgctgattgatgtttgtggttgatataaaccttcaatcatttccggcttaacgtcataatgctgatttaatactttatctgaagcttcttttttattgataaaacgcgtaacaaatgacatgtcttctcgcattggttgacgaatttgttgattaacatgttcttgtaacgcatctgtcgctgttaataatcgctgttgttgaatttgtagctttttcttctttttattaaaaaatccgccaacattaaagtcttgagacatactttccaaataacttcgtaacatttctctcatattatgcggcataatgtatgcattttctaaaatatttttacgcttattctttaaaaatgccattaattcatctggattatttaaaagttgtgcctcttcactaattgcttgatgttgttgactatttaaaaatgcttgttcaaactctgcttcttcgatacctaaatcttctagtacttcctggatttcagactgaatgtaatctagctgagcttcggtaatatattcaaccgttcttgatgtataatcctctattgtctctctatgttgatctaatgaaattagataacttgataatacttcaagttcattttcagggtgatcaaatttagatacataaaaggtgcgttctaatttaatgccccaatctgcaattgatttttcaactcgtgatttaaacgtagagaatgacaattcatcgtcttgatgcttgtcaatttgattaatgataaacacaacaggtattccaacatcatttatatgcttcataaacttaaagttaagttcagattgaacgtggttatagtcaaccgtataaaatatcatattacttgtatacatatattgttctgttattgactgatgtgatgcaacatttgaatcaacacctggtgtatcttgcaacgtaaacccattttcaaatttagctgattgaaaattaatttctacagattcaacgtcgacattttggcgattcatttcccttacttcatcataattagataatttggcatacgtttgattcggcaaattagcaataatatcgtgattgtctgaaactgacacaatagcagtattacttgtcgttggtacaggtgaacttggtaagatatcttgttcaattaataaatttatcagtgtcgatttacctgcagaaaaatgtccaacgaacgaacatgtatattgctgcaaatatactttcttaattacttggttaattgtatgtaaaagtgcttcatttcgcgacttttcaacttctttttttaatttatataaaagatctaattgttctttattaatcatgttactttcccctttggttcgttcacatagaaatgcttgcttgttaaaacgaattaatacaatatcgatgtccatttaaacaaaggtcgttgaatggctcgcattgtattatgtttaaattttatcatagctgcttgataaaacatacgaataatcaattttcttcaaacattacaacttaaaagttcatttttctaaaaatcacaaatcaacgttaaatttttctagaaaataaatattgtcacagtttgttcacacacgtcacagaattgacaccgtataatagccaattgggagggaaatatgaaaaatacatttaatccattacaaagattacatttctacgcagcaatatttattgctccactgttaatcactttaaccatttcgggcattggttatttgttctttccagaagttgaaaataatatttataagaatgagttttttggtgacagtgatgtcaaaacacatcaaacattaaatgatgcagtacatcaagttgaacgacaatatgaaggattctttgtaagtaaagttagcatacttgatgaaccatataacaagcgaattacactgagtgatatggcaggaaatcagcgttacgtctttctagatcataacaatcaatttgttgcagatcaaaatgcgaaacatacgtattctaatgtggtgcgaagtatacatagttctttgtttactgaaaatactattattaattatttagttgagttaaccgcatgttggacgatattcatgattttatctggtatttatttactcattaagaagcatttaatttctaacaaaagtaaggcacttcattggcaaaagtggcacgcaatgattggaattatcattgcaattccagtatttgtattagttttaactggattgccatggtctggttttatgggcagtaaaattgccggtatgatggacacaaacggtgatcttggtcaaggtgaattagcgattaatccacctaaatcagatttgaatgagttaccttgggctacacgtaaaaataaacagccagcttcatccgaaaaaggttcaagtggtcatcatggtaaatcagcaatgcctcaaaccaaattagattatcaaatatctattgataaggtcgttgaacaggcgcaaaaatctggtattaaaaagccgttttcaatcgtatatccaagtgataaacatggtacctttattgtatcaaatactagtaattcaggtgttactgggctagatgtatcaccttacaaggaacaaacactttatttcgatcaatatagcggtaaaaaactaggtacgattaaatatgatgactacggtattattgctaaatggtttacatggggcattccgcttcacgaaggtcatttattcggtattttaaacaaaatcattaatttatttgtatgtatcgctttattagtagccattggcatggggtttgtctcttggataaagcgtacaaaaaatactgcagtaaaagtaccaaatcgcgtaaaaaaaccagcatctatatcactcataatatgtttaattgtattaggactattaatgccattatttggattatcacttatcctagtatttataattgaattaatattatatattaaagatcgtcgtgctaaactataatgcacttaaagttttgaactgacgaaatttaaaaaatgattctcgattctctaattacttaaaacgggttctataataaatcgtactgatggataagttttttacttttcatttgtccgattttttgaatttgaagataaaaaaagcatctaaaacgtataagaagattactttacttcttccaaattacgttatagatgctttttattaattcatatgcatgtcgtgaattttcatcattaaaccgtgtgggacgtcatcatgtttaacaatctcttgtttataaaatgtcttcccatcatctttagaaactaattttacaaagtctccttttttcggtttaaaatcatttgatggttctactttgatattatgtttgactaatccatctttttcactgacaactttttctgcatttgtattactattcatataaccaaaataagtcgttttttgactagaaaaaatcattaaacatacaacggcaataccaataacaaccaatgctatagataaacctagacccatttttttacccatttatagactcctccatttttcaaaaatacctattatcatgagaacttaattattactaattttagtcacgcattagaaacactttagttttcaatagttttacgttctgtctttttaccccagtattgataataagtacattctatatatccattaaataacttacgtcgcttcgttgctttacgatttactaaatattcaaattctttattacttgttaaaatgtatgtagataaaaatggatgttgtttcattagtttaccaatataacggtacatttcttcaacttcttcacgatcaccaatacgttcaccatatggaggatttccaattaacgccactggttcttctgtatcaattgttaatgtattgacatcttttacactaaatttaataatatcagacaacccaacttcttcagcgttacgcttagcaatctctaccatttctggatcgatatcagaagcatatactttgatttctttatcataatcagccatcttatcggcttcatcacggtaatcatcataaatatttgctggcatgatgttccattgctctgatacgaactcgcgattaaaaccaggtgcgatattttgagcaattaaacaagcttctatagctattgtacccgaaccgcaaaatggatcaattaaaggtgtatcacctttccagtttgcaagacggattaaacttgctgccaacgtttctttaattggtgcttcaccttgtgctaatctataaccacgtctgttcaaaccagaacctgatgtgtcgatagtcaataatacattatcttttaaaatggcaacttcaacagggtatttggcacctgattcatttaaccaacctttttcgttatatgcgcgacgtaatcgttcaacaatagctttcttagttatcgcctgacaatctggcacactatgtagtgttgatttaacgcttctaccttgaactgggaagttaccttctttatcaataatagattcccaagggagcgctttggtttgttcgaataattcgtcaaacgttgttgcgttaaaacgtccaacaacaattttgattcggtctgctgtgcgcaaccataaatttgcttttacaattgcacttgcgtctccttcaaaaaatatacgaccattttcaacatttgtttcatagcctaattcttgaatttctctagcaacaacagcttctaatcccatcggacaaactgcaagtaattgaaacatatatgattctccttttatacaggtattttattcttagcttgtgttttttatacatttccaccaaatttaatcgctgatacgttaacgcattcgcttattattttaaaacaaggcagtgtcattatatcaagacaaggcgttaattttaagtgttcttttcatgaaaaaagctctccatcatctaggagagctaaactagtagtgatatttctataagccatgttctgttccatcgtactcatcacgtgcactagtcacactggtactcaggtgataaccatctgtctacaccacttcatttcgcgaagtgtgtctcgtttatacgttgaattccgttaaacaagtgctcctaccaaatttggattgctcactcgaggggtttaccgcgttccaccttttatatttctataaaagctacgtcactgtggcactttcaaattactctatccatatcgaaagacttaggatatttcattgccgtcaaattaatgccttgatttattgtttcatcaagcacgaacactacaatcatctcagactgtgtgagcatggactttcctctatataatatagcgattacccaaaatatcacttttaaaattataacatagtcattattagtaagacagttaaacttttgtatttagtaattatttaccaaatacagctttttctaagtttgaaatacgttttaaaatatctacattatttgaagatgtatttgttgttgtattattcgaagaaaaacttttattgtcctgaggtctagatgttgctacacgtagtcttaattcttctaattcttttttaagtttatgattctcttctgataattttacaacttcattattcatatcggccattttttgataatcagcaataatgtcatctaaaaatgcatctacttcttctcttctatagccacgagccattgttttttcaaaatctttttcataaatatcttttgctgataatttcaatgaaacatctgacattttttccacctcattagaaactttgatcttcagaccactgtaagtcattgatgaatgctgttaattcatcgaacgtcacaatatcacaagtatagtttgttttatccataaaatcaactaacatctgcttgaagaacttaggactcgcctcttgttcctcatcataaatgagcaatgtttgatccgaatgttcaagcataaattgatctgcttgtttaaattgaaaaggaccttgatacgacgtatgaaaaatactatcaacataatctgcatgcttaattatgttggcatacttactttgattatgttcattccacttttctgtatgtccttggaacggtgtaattacagcaaactttaacgaatcatatgttcgttgtaattcaataacaacttctgcagtccataattctatacccatttgcccttgtattaacacccattctaatccttcatccaacagttgttcaattttatgttttataaattgttttaaataatgtacttcaggtgcgtcatctttaaaaatgtttaattcgaatgatttgtaacctgttacataaactgttttaaccataagtaccctctttagttacgccatctaatatattttgtaaatcatattgaacacttttaagcttttcaataaataactttcgacttgttcgcttaaaatgacattcgacagaaagttgttcaatgttagcaatcagtagctcaaatttccttgaattcatataaggtacttctattataaattcacgatgtaatttgatttcattgagcaagctatcaatatgttcagtatatggctttacagtttgataaaaatcatgatcttgttgttgtgatttcacattttcgaaattttgttgcatgttgttaacttcataaattagtgattcgactacatcattcatgaggacgcctcctacattttttaatttatcacaatatactgtattcgtcatgttttaacactctatctaatttgatttaactttttttcaaataggttatctgttaaatcaagtaaatctaaaaacttcctatataaatacaaaattttatcgtgtatgttgttatacgatgaaaatacttttaatctaataaaatcatttaaatcaaatacacctctgttgattaacaacacatacttgtacttgcctcaaaaataataattactgatcatgatttgacttttataacaaaattcaaaaatattgtaatgagtattcatttttataagcaaaacttttcaattaattaaaattgtgtgtaaaattccaacattaacggtaaatgtattataatattattgtgttaatgctgaaatcacgttaaaataagctttggtgtattgtgtctttcgcatttatactaatttaagtttggtgtttcactataatgttgtgtataataaacaacgtttactaccaaacttgtgtggtgaaatttatgaattatccaaatggtaaaccatatcgtaaaaatagtgctatagacggagggaaaaagaccgctgcctttagtaatattgagtatggtggacgtggtatgtcacttgaaaaagatatcgaacattcaaatgcgttttatcttaaaagcgacattgcagttattcacaaaaagcctacgccagtacaaatagttaatgtcaactatcctaaacggagtaaagctgtgattaacgaagcttattttcgtacaccttcaacaactgattacaacggcgtttatcaaggttattatattgattttgaagcaaaggaaactaaaaacaagacgtcctttcctttaaataatattcatgaccatcaagtcgaacatatgaaaaatgcatatcaacaaaaaggtattgtgtttttaatgattcgttttaaaacgctagatgaagtatatcttttaccctattcaaaattcgaaatattttggaagagatatcaagataatattaaaaagtctataacagttgatgaaatacgaaaaaatggttaccatattccttatcagtatcaaccaagattagactatctaaaagcagttgataagttgatattagatgaaagtgaggaccgcgtatgacggaaaacaaaggatcttctcagcctaagaaaaatggtaataatggtgggaaatccaactcaaaaaagaatagaaatgtgaagagaacgattattaagattattggcttcatgattattgcatttttcgttgttcttttactaggtatcttattgtttgcttattatgcttggaaagcacctgcttttaccgaagctaaattacaagatccgattcctgcaaagatatatgacaagaacggagaacttgttaaaacattagataatggccaaagacatgagcatgtaaatttaaaagacgtgccgaaatcaatgaaagacgcagtacttgcaactgaagacaatcgtttctacgaacatggcgcacttgattataaacgtttattcggtgcaattggtaagaacttgactggtggatttggttctgaaggtgcctcaacattaacgcaacaagttgttaaagatgcatttttatcacaacataaatctattggacgtaaagctcaagaagcatacttatcatatcgtttagaacaagagtatagtaaagatgatatcttccaagtatatctaaataaaatttactattctgatggcgtaacaggtattaaagctgctgctaagtattactttaataaagatttaaaagatttaaacttagcggaagaagcttatttagccggtttacctcaggttccaaacaactataacatttatgatcatccaaaagctgctgaagatcgtaaaaacactgttttatacttaatgcattatcataaacgcattacagataaacagtgggaagaagctaagaaaatcgatttaaaagcgaacttagtaaatcgtactgctgaagaacgtcaaaacattgatacaaatcaagattctgagtataattcatacgttaactttgtaaaatctgaattaatgaataataaagcattcaaagatgaaaatttaggtaatgtattacaaagtggtattaaaatttatacaaacatggataaagatgttcaaaaaacattacaaaatgatgttgataatggtagcttctacaagaataaagaccaacaagttggtgcaacgattcttgatagtaaaactggtggtttagttgctatatctggtggacgtgatttcaaagacgtcgttaacagaaaccaagcaacagatccacaccctactggttcgtctttaaaacctttcttagcgtatggacctgccattgaaaatatgaaatgggcaacaaaccatgcgattcaagatgaatcttcatatcaagttgatggatctacatttagaaactacgatgtgaagagtcacggtactgtatcaatttatgatgctttacgacaaagtttcaatatcccagctttaaaagcttggcaatcagttaagcaaaatgctggtaatgatgcacctaagaaattcgctgccaaacttggcttaaactacgaaggcgaaattggtccatctgaagtacttggtggttctgcttcagaattctcaccaacacaattagcatcagcatttgctgcaatcgctaacggtggtacttataacaacgcgcattcaattcaaaaagtagttactcgtgatggtgaaacaatcgaatacgatcatactagccataaagcgatgagtgattacactgcatacatgttagctgagatgctaaaaggtacatttaaaccatatggttctgcatatggccatggtgtatctggagtaaatatgggtgctaagacaggtactggtacttacggtgctgaaacttattcacaatataatttacctgataatgcagcgaaagacgtgtggattaacggctttacacctcaatacactatgtcagtgtggatgggcttcagcaaagttaaacaatatggtgaaaactcatttgtgggacatagccaacaagaatatccacagttcttatatgaaaatgtgatgtcaaaaatttcatctagagatggcgaagactttaaacgtcctagctcagtaagtggtagtatcccatcaatcaatgtttctggtagtcaagataacaacactacaaatcgtagtgcacacggtggtagtgacacatcagcaaacagcagtggtactgcacaatcaaataacaatactagatctcaacaatctagaaacagcggtggattaacaggtatattcaactaatccactcaacataaaatcctcagttataccatatttatggtgtagctgaggatttttttataagtattcatacgctattgctatattagtagaaaccgtaaaatcagacattcacatacattttgaaacatctaaatagtctttcatattcacatctttagctatgtaaaattattgaaattgcaaaaatggatgttcccatttttaaaattatgattatattttctcatagtcatcttagacgttattttaaattgaaatgtttatcaattccctgagtacgttaatcagtgaactatcaacatgtttgcaacatattttcacaatcatagatataagaaatccacctacgattcgaaatagatatcttaaagcatacctcaagatatccattatgatgtagatggacagtttttatattaagacgttgtaatgacacgacacctaacataaatacaaatatgtgtgcatgaattagttttacatcttttcaacattaggaaatgatcaaacttgtctatacctgcttattctttaaccttgtttgataactagcattcattttaatcaattcagttttaaaggtcttcatttgtcgatagcccataaaatgatatttacgttcaatcatataatcatatctttctttaaaattcattggcacaacaggatattgatttaaattatcaaaatcaatattgccagttatgtcattaacctgcttaaaataatcaataattttactatggtattcatccaagtaaggttttgcttcactagaacctaatgtcttatttttggcaaatacatcaatctcttgttctaaattatcaaatacctcttttgtaatatttgtcatgttatcacgcttctttcaaactagctttataacgtttttgtccttctctacaatcttctaatagtggacaaatatcgcatttaggttttcgggctaaacagtggtatcttccaaagaaaatgagttgatgatggctcctattccatctatctctaggtatgacagaacataaacggtcttctacctgtctcacattatctttccaacgattaatacctaagcgtttagaaacacgttctacatgcgtatcaacagctaatgaaggttcatcaaatgctacactcatgactacattagcagttttacgtcctacacctgctaaactttctaattccttatgtgtttgtggtatttctccattaaattgatcaatcaaagattgacaaagtttcttaatattcttagctttgttacgatacagaccgatagaacgaatatcattcataagttcttcatcactgactgccaaataatcttcaggcgttttgtattttttaaacagctcagttgttactctatttactagaacgtctgtacattgcgctgacaataatacagcaatagttaattcgaacggattatcatgttttaattcacattctgcatccggaaacatatttgctataacatcaatcatttctaatgcttttttcttacttaccatcaaggttctccccgtttaaccaatcaaatttaggtaccgttttaactgtgtgcgtcattttcggtttattaaatttttctcttatttttctagaatcatcaattgttttgacattatttttcttccaattaagtaaaatacgatccatatatttaaagctaagtttattcaaactattcgcctcgtctaatgccgcttgtataattgcagtatcgtgtttatcaacatcaatccattgatttaacgtttctatttcatatggagataacggccttgcaaatgtatcctctaaaactctaaataattgtttaaatttttctttactattttgctctttcgtttccatactttgttgcttcaatatatgacttaatttttcgaaaaaaggatctagattcatatattcagtaaatctaccttcttcatctttttgaacttgtaattctagcaattcacgttgtatcaaattttgaataaccattgtaatatcgcgtggttgcatagttgagcccttctgaagtaattcaattgaaggctgtttatttgatgtttcggaagcataaatcaatttaagcaaaatgactaaatcttgctcatctaaacctaagtcactgtaatggtctaataattctcttcgtatcactacaggtcttgcttttaattgatatttatccatgttcgtgcccccttttaaatttaaccattacttaatagtataaatcattttctttaattttcgactaaaatgcttaatatatttaactagtagcaaacaaattttaaataacagtatttttttaaaactagtttttaacaatgaactttatgtataatcagatgagctatttattttccaaatatagttactaaacaaaagtttgttcatgcttaatgaaacccgttatcaatttacattttccaagcataaatcgcccagctattaataaaggctggacgattctttttattatcataatataaattttaagtaacgatcctaaaacttatggatataaacggtttaataatcttgggaatggtgcagtttcacgaacgtgttcaacaccagaaatccatgctactgtacgctctaaacctaaaccaaatccacagtgtggtacactaccataacgacgtaagtctaagtagtaactatatgcttcttcgtctaatccatgttctttaacgcgttgttctaacaattctaagtcatccacacgttcagatccacctataatttcaccgtatccttcaggtgcaattaagtctgcacataatacagtttcttcattctcaggatttggttgcatatagaaaggcttaattttagttggataattagtaataaacaccggtaaatcataatgattagcaatggcagtttcatgtggcgcaccaaaatcttcgccccattcaatatcatcaaagccttctgcttttaagaattcaattgcatcatcatatgaaattctagggaatggtgtcgcaactttttcaagttttgatgtatctcgctctaaaattttcaactctagtttacaattttctaaaactgattttactacatgtgttacatattgttcttgaatttctaaactttcagcatgatttgtgaaagccatttccccttcaatcatccagaactcgatcaagtgtctacgtgtttttgatttttcagctctaaaagttggaccaaatgaaaatacttttccgtgtgccatagctgcagcttctaagtataactgaccactttgagataaaaacgcatcttgatcaaagtatttagtatggaataattcacttgtaccttctggtgcacttgctgtcaaaattggtggatcaacctttgtaaatccatctttgttgaaaaattcatacgttgcacgaataacttcatttctaattttcattacagcatgttgttttttagaacgtaaccataaatgacggtgatccattaaaaattctgtaccgtgatttttaggtgtaatcggatagtcatgcgcttctgaaataacttcaattgattttacttgcatttcgtatcctaagtcagaacgattatcttctgtaattgtgcctgtaacatatagagatgattcttgagtaatttctttcgcaagtttgaatacctcttcatcaacttctgatttaactactacgccttgcataaagcctgttccatcacgtaattgtaaaaaggcgattttaccacttgaacgtttatttgttagccaagcaccaattgtaacgtcttggtttaaatgatctttcgcttgtttaatcgttgttttcataaccattctcctatttattttttcgttatacaatactcattcattttaacaaaatccgctttcaagttctagaactagactaaaagataacgtgtaaatggtaatgatttaagcacagatttgaacatttatttatattaagacaatagaatcatcagtttcagacaaaatatataataaagcctcaatattattagtatgaaggtcgttttttgtgctaacattcaagtttaattataaaactcaaattttgacgaccaaacaaaaattcttgtaacagaacatagcacatgtcatgtcacaagaattttactttgtattttactttttctttttttgaatttgtcttaataattttccaaactgttgtatgtcgccttttttctgacgataattttcaagtgtttgttcaaaaaagtttttataattactatttatgagtcgatcatcaaatgaaactattatgccgcgatcattttcatttctaattaatcttccaagtccttgtctaaaacgtgtaactgcatcaggtaatacatattccttgaaagttgaagtgaattcagaatccataagccaatattttgcattatgcttgttcataaacggtaacttcgctatcatcacacatttaataccatttgcttgaaaatcaaagccttcaaaaaatgttgacgtaccaagcagtatggccttatcaaaattattaaactgttgtactattttataattttggttctgctgttgtgttaatacaacataatcttcaaattctggcaattcatttagcatatcttgtaccatatgcatcattttataactcgtgaataagactaaacattttgatgacgttatagtcgtatattcaataatatagcttacaatcgatgctacatactcatctatatttttatattgataagatgctacatcactcggtataaatacacttgtattttttgcactttgtaacgacgtgttaacttcaaatgtattaaagtgaacatctttgttgaataactgtttaaaagcctcaaacgaatgattaaattttaaagtaccagatataaaaatgagtgatttaaatttttccaatacttgtttcgttaatacatcttttacagcataatctttcacatataaacgtattgttgatttttgagataaatttttaattgaaatgaaactagtatgtccagcttttaaactttgttcgatatttttaaatttatcttttaaatacaacaactgtttccgtaatgatttaactgttttatgactaatgccattgaatatttctagcgttttatttaacttatcgataatcgcatgtaaatccttcaaaatgtcttttgtttcaaaagtaaatacattatggaagcgatgaatatcatcatcataaacatcagaatcattgataatcgtaaatatcgttgagaacaattgctcatttaactcatgaatctcattcatactagccttcaagccaaaaatatcaattggagcaatatctaatttttccaaaattcgctgcttttccagttgatcaattgcctttaacaatttttcattttcgtttttaccaatcaaaccaagctgatatttaatatcagcataactcaactcatttgtcacttgatttaaggcatagtctggtaagcgatgtgcttcatccactatacaatcatcaaacaattgatatattgaattttcaacatcagaatgaattaaatgtgcatgatttgtaataccaatttgaatgttctgtgcatttcgcttaataaaattataatagtgaacatcgtgacgtgccggtacatatgtttcaattttttggtcaaaatacatcttttgaccaccttttaaatttaattcctgtatatctccggatggcgtctctgtaatccaaatcagcaattgcattttcaagatattcacttcgtaattacttgtgtcatcttttaaaatttgactaataagtcccaatgaaatgtaatcacttttacttttaatcaatagtgcattaattttaaaattcaatgcttcattcattgctggaatatctttttctaataattgactttgcagtaatttggtattggtagaaatcataacatgcttcccagtttcaatattatacatcaaggccgcaagtaaatatgctaatgatttaccactgcctagtgatgcttcaatcattgctttttcactatgcatgagctgatctaatatagtttccgctaaatataattgttgcggtcgatatgttaagccaagttgatctacagctttgctatataaagacttcaagctgccattataatttgttgtcggctttttaaaatcaacttgcttacgatatattatctgttcgaacttttcgtacgatttatccaatggctttgcatcatattgcctaaccatctcaaagaaaatatcatacaaatcgtatttcaactgtttacttaaataatataattgttttaaagtatctaacggtaacttttcaaatttttcaaaagctaatatcatcaatttagcagtagtagcggcatcttcgtcagctcgatgggcatttgctaaggtaataccatgtgcctccgctaattcacttaattgataacttttatctgtaggaaaagctattttaaagatttctagtgtatctataacttttttgggacgatattgaatattacaatttttaaatgcctttttaataaaatttaaatcaaaatctacattatgagcgacaaaaatgcaatcttttatcttatcgtagatttcttctgcaacttgattaaaatatggtgcttgttgtagcatattttcttcaatggatgttaacgcttgaatgaatggcggaatctctaaatttgttctaatcatagaatgatatgtatcaataatatggttattgcgcacaaacgttataccaatttgaatgatatcgtcaaaatctaattggttgcctgttgtttccaaatccacaacggcataggttgccatacccatagctatctctccttgcttcagtgttaaaaatctatatctgcactaattaaacggtgtgattcacccgcttcatctctaacaattagatagccatcgtaatctaaatcaattgcttgtcctttaaactgtttatcattttctgtaaatagcaacgttctattccaaatattagaagctgcaatatattcttcacgaatttcagaaaaaggtaacgttaaaaattgattatatcttttttcaatttcttgaagtaatctctctaaaaattgatatctatctaatttatttttatcatgtaattgtatacttgttgctctatgtctaatactttcatcaaagtcttctagttgttgcgtcaaattaatacctataccacatattattgcttctataccatcattattagcaaccatttcagttaagaaaccacacactttaccattatcaatatatatatcattcggccattttactttgacttcatcttgactaaaatgttgaatcgcatctcttatccctaatgcaataaataaattaaatttagatatcattgagaatgcaacgttaggtcttaacacgacagacatccaaagtccttgcccttttgaagaactccaatgtctattaaatcgcccacgacctttcgtttgttcatcactcaagataaaaaatgaagattgatttccaacaagtgactttttcgcagcaagttgtgtagaatctattgaatcgtatacttcactaaaatcaaacaaagcagaactttttgtgtattggtctattataccttgataccaaatatctgggagttgttgtaataaatgtcctttatgatttactgaatctattttacatccctctaactttaattggtcaatcactttttttactgcagtgcgcgatatattaagtgattccgcaatgctttgtccagatatataattcggtttatttttatagagtaattgaagtacatcttgactatattttgacatgattattcacccatttcaaaatttcagtttcttcgttgcttactttacctgttacaatcgctatctcaatttgtcttagcacatcttttaaccacggaccacttttggcatttaaatgtgccataagtacaccgccattaaccatcatgtcttttctattatgcataggtaaatgatgtaatgtttcatcaatcgtttgaaggttaacgattaatggttcatgtccttgaatatcatttgcctttaacacgtctgctgcaaccattacatttttaatgagattcgtatcataatcataaacaaacatttttaattgttcttttgtaataatacttggtaatgcattcataatttgaatatattgattgatatcttttacttgtcggttacttagctttaaaggcttcaatgagtaattaatatcaaatttaactgacactatagcaatcaacaattctaaatcaattggttcagttacattaatttgattcatatcaagatgttcgaaatatggcatataattaaatgctttcagcgattttaaatgattaaaactctcttcaacattaatacctcgcattaatttagttagttcaatcactatacgctcaattgataaaaatttaatatctgccatttgtgtacgcatcgcttcaaatgtttccgttgcaatttcaaatgataattgtgactggaatcttaaacatcgaatcatgcgtaaagcatcttcttggaatcgttccgcagctatacctacagttcttattattcgattattaatatcttgttgaccatcaaaataatcatacaatttgtatgctgtatccattgctatcgcattcatcgtgaaatctcttcgttgcaaatcttcgtataaatcacgaacaaatgtaacaccacttggtctacggtgatcgacataatcttcttcagcccggaatgttgtcacctcataattttcatcattaaaaactacatttatggtgccatgttctttacctacaggtatcgtatgactaaagatagattctatttcatctggcgttgcacttgttgtgatatctatatcatgaatatttcttcccatgacataatctcttacagagccacctacataatatgcttcaaaaccattgtcttgaatttgttctaatataggccttgcctgttcaaataatgatttatccatattattactcgcctttacttttgttatgctcatttagcattttttgatagtaatactcatattgatctgtaatgagttctgatccaaaacgttcagcaatatctgctagcatgtttttctgaagtttgttgtataacaccttatcttcaagtaatcgaatagcatagtcactcgccgaatcacaatcacccacatctacgacaaatccagtttcaccatgtttaataacctctttaattccaccggcatttgaaccaattggaacgacgcctgttttcatagcctcaagtaaagttagtccaaagctttctttttcacttaataataatactaagtcagataattggtaaaattcacttacgcaatcttgtttccctaaaaataaaacatcctcttctacgtttaactctttcgtcaattgacgcattggcactaattcaggaccatctccaagtaaaattaatttactaggtatcttatcacgtacttttgcaaatgtttctataatagtatctatgcgttttacttgtctaaaattcgatacatgtattaacactttttcatctggtgctataccaaattgtgattttaacgctgtgttatgtttagttggaaactcattttcacgtacaaaattataaatcggtataatctctttgttagtttcgataatttcatgtgtttcttgcgctaaagatttactcacacttgtcacaatatcacttttttcaatgccaaatttaattgcaccttggagtgaatgatcatagcccaaaacagtaatatcagtaccgtgtaacgttgtcataatttttatatctttacctgacatctcacgagctaaaatcccacaaattgcatgaggtacagcatagtgcatatgcaacaaatcaagatcatattctttaataacttcagcgattttagtacttaacgtaatatcgtacggtggatactgaaaaactgcatattgattcacttcaacttgatgaaaaatcatattcggtaatggttttcttattctaaacgggatatttgaagtgataaaatgtacttcgtgacctcgctctgctaatttaatccctaattctgtggcaataattccagaaccacccatggacgggtaacatgttatacctatcttcattcgcttgcccatcctttctttctatttctctttctattattctcgatgcgtagataattgtttaaatttaagtttatagtaatgttgagtttataatttcaaatatctaaaaaacaggtgttgtatatataatcatttatctagttatacttactttaaaaataatatgatttcatgcgatgcaattcattgatggatgtttttaatcttaatcaaatccaattaaagcatatatttttatattcactttctttcgaatcgatttttatctcttgtattaaacttttccattgtttcattaaagctctctgtcatatctattcccattgaattcgctaaacataacaacacaaataaattatcacctaattctgctttaatcgtatttgcttcctctgaatctttcttctttttttcaccataggtatgatttatttcacgtgcaagttcgcccacttcttcagtcaatctagctaagttagctaatggtgaaaagtatcctgttttaaattgtccaatatattcatcaacttcacgttgcatttctaccattgatttcatttctacgttctccttatattgcatttctaatatagtatatatcaatttgaagtctcatgcatgtttagtgcaatctactgactctagctaaactagatgacaagttgtttattttagaagtttaatcattcagtttatataaatgtaatgcattcctaactaaattaaatcaattgaaattgagattataactttatgattcgtaccactacaataaaataatatagttaataatctaccattagaaaataagcacaaaaaaactagcaatcacacaaaatgtgattagctagttaataagtgtctaatttaagttaattgttaatctataagattaatcacttgaacgcgcaatcaaaataatacgtacaagctctgctacagcgacagcagttgctgcaacataagtcattgctgctgcagataatactttacgcgcatgtttgtattccttttcatttacaatgttcaatgccgtaatttgtttcatcgctcttgaactcgcatcaaactcaactggtaacgtaacaattgagaataataccgctaatgacattaaaccagcaccaatccataaagcagttgaaccaaatgcactacctatcgctgttaagataaaacctaacatgatgatcatataacttaatgaactccctaggtttgcaacaggtactaatgctgctctgaatcttaagaaccaatatccttggtgatcttgaatggcatgaccaacttcgtgggctgcaattgcagttccagcaactgatggtctgtcatagtttgcaggagatagtgaaacaactttctttttaggatcgtaatgatctgttaagaatccttcacctttaacaacttcgacatcataaataccgtttgcatgtaaaatttctaatgcaacttcacgacccgttttaccactagttgatctaacttgtgaatatttctcatagttagatttaaccttgtgttgtgcccataaaggaagcaccattaatattacgaaataaattatcatagtaaaaattgaagacaataaactcactctcctttataaatattttactgtcatttgccgtttttatcaaatcatttacactttaataatttgtttaattcaatataaagcaaaagtccaaaaacactcagacaacatgataatacaccaatttgccacacatgtgtagttataaaatcataatatggaaattgaaggtgaaaatagtcaatataatcattcaaaaatacccaagtcatcgctacactgattccaatcatagaacgtttaaacctaggatagaagtaaattgcctgaacagccattatactgtgggaaaacattaataccaggccatttactgtaatatcaccttgttcaataataaataatatattcataataactgcccaaatcccatatttgaataatgttacaaatgccagtgcatcgataatactattttgttttcggattaatatcaatgagatagaaataactaagaataatattgcagttgggctatctggaacaaaaatcttaaactgccacggcgtatgacttaattgttcaccataccatatataaccataaatcatccctaatatattacaaatgagtagcatcattaaccaagaacgttgataaagtgtatattgccaaaatgtattaatcgtcatctgctaagtcctcaaattgattatgtttatttactagcttgagtgtatttaaaatttgcgttagttgataaaaacgttgcttttcattcatctgtaaacttaaatcaatattatgtagcaagtaatctattaataacgcatgtttatgccgatctatagacatactatttaaatcatgaagataagtttgatagctgggcgattccgttagttgagcaactattaaatcatctagcctttgctcacgctttgacacgtttgcgaactgaatttgaatatcaaaagcacagttatgattagcgatataatcaaatatttcatttgtattcattaactttatattatgcttagtaaattgaattgcagaagcgtgacttcccacttctgcaatttctaatgtttcatgatgattaatttttgtatctacaaaatgaatgtttgccaatttcgcctcattcacttttatatagttaagcacccaaactgcaatacgcgacttaaatcgatatcgaaaaagtaaatattcaataaaactttctttaatttgattgagtgtctctgacatcaaataccccattttaagattgcaatcttgataattcgtcatgccaattttcattacttggttctagttccaacaattgatttaaaatagtaattgcttgttccttttgaccagtttcaattaaatagaaataataatcactcataaaatcaatatttgttttcatcgttggatatgctaattcaaagaaatgttgagcttctttatctcgctcttcttgaccataggcgaacgctaaatgccacatgaatgtaggatccaaatcttcttcatctacatatgttaataattcaatgattgcttcataatcttcttcattacgatataaatcgcttaaaatcaataaaggttcttggtaagcattatcaacctctaatgcttgttttaacaataatacaccttcattagcatcgccgtgttctatttccaaacatccagttgtatacattaactctttataaaattgacttagtcgtaatccttctttacccgtttcaatggcatctggataatttttttcattttcatataatgattgtaaatacaagtagccttgaatataatcagggtctttagaaagtaatgtagtcattattttaattgcttcttgagtgatgtcatttttatcgtaagaaatggcttttttgagataatcttctgaagtcatttcatcttcattaatttcatcgtataagcgaatcgcatcactataattaccactttgcaaactacaatctgccatacgagagaataagtttacaccattaacttgatattcaccagtttctaaaacagtttcgtattcagaggtagcacgtaaatattgaccatcataatataacatttcagccaacgcaaaatggattattggatcatttggctctagttcaagtgctccttgtaatttatcaatagcaacttccatcatattaatttgttgatataaatctgcttctaacatcaacttttcaggtgatggttcaacataacttaaatattctaacgcttcgtcagtttgattttcagacattaaaccttcaataaaataaatcagcaattcactttcgtctggatatttgtgatataacacgcggaatacttctaaaccttgtggcattaatccaaaattgtaaagtgtctctcctagaataaataatgcgtcatcgttgtcagtagttattgcttcattaacacgagagtctaaattttctagtttttgtagattgatatcgtctattaatttatagatatcttccattttatattatccctcattttctaaaagctttagttttggtaaaaatcctggaaatgatacatttacagcatcaaattgtttgattttgacaggttcgcttgaaagtagagaagcaactgcaagcatcatccctattcgatgatccgttaaactatccactgttgcatttgttttaaattctgacggatgaataatcaatccatcattagttggttgtaattcaaaccctaacaagtttaacatatcagccgttgtatcaattctatttgtttcttttacttttaattcctcggcatctttaattgtactcgtgccaactgcttgtgtacaaagtaatgctattacaggcagttcatcaattgcttttggcactaattctccttcgattgttattggttgaagcattggtgtgtattgaatacgaatagaagcagtaggttcagcaccagttgtttgattgaaaagttgaatattaccgcccattttttcaacaatatcaataatacctgaacgtgttggattgattccaacattatgaattgttacatcacttcctggtgtgataagtgctgcaacaataaagaacgctgcagatgaaatatcgccaggaacatgaaaatctgcaggtttaatgtatcgaattgcttcaggggttgtagtaattgataacccttctgcttcaattggaatattaaaatgtctgaacatcgtctcagtatgatttcggcttacatctaattccttaatgatggtcggttccttagaaaatagacttgcgaataagatggcacttttcacttgtgcacttgccacttccatcttgtaattaatacctttaattacagacggtttaatgattaatggggtgtaattgtcttcaattccttcaatatttgcattcatactttttaacggtcttaaaacacgatccatcggccttttacctatggaaacatctccagacaagacactttcaatacctaaaccacttaacaaacctgccaataatcgtgttgtcgtaccagaattacctgtatacaaaacttgatgtggcgtgttaaaagattgatatcctggggaagtcacaactaatttttcatcatcttctttgatttctacacctaacagtcggaaaatatccatcgtacgacgacaatcttcgccaagtagtggcttatatatagtagatacaccttcagctagcgacgccaacatgattgcacggtgtgtcattgatttatcgcccggcacttctatttcgccctttaacggacctgaaatatcaatgatttgttcatttaccatttcattcacctacttaaaatatgtttttaattgttcacatgcatgttgtaatgttagttgatcaacatgttgtacaacgatatctccaaattgtctaatcaagaccatttgtacaccttgcttatcattctttttatcacttagcatatattggtataacgtttcaaaatccaagtcagttatcatgtctaaaggatagccgagttgtattaaatattgaatataatgattaatatcatgcttagaatcaaacaaagtattcgcaactataaattgatagataatgccaaccatcactgcatgaccatgaggtattttataatagtattcaacagcatgcccaaatgtatgacctaaatttaaaaatttacgtacaccttgttctttttcatctgcaacaacaatatccaacttcgtttcaatacctttagcaatatatttatccataccatttaatgactgtaatatctctctatctttaaagtgctgttcgatatcttgcgtcgctgattcaccattcaataacgcatgcttataaacttctgcatagccacttaatatttgctcaaatggtaacgtctttaaaaagtctaaatcataaatcacagcagttggacgataaaatgcaccgataaggtttttaccttgctttgagttaatacccactttaccgccaacactagaatcatgcgccaaaatcgttgtgggaacttgtataaaatggacacctcttaatagtgttgctgctacaaatcctgcaaaatctcctgttgcaccaccaccaacagctataatcgctgtatttcgcgttacatgatgcgacaaaatgtattctaatgtttcttgatattgctcaaatgttttcgtcttttcaccagctggaataatgactttatgcacatttttatatgataaaatatcatcaaatttattcgcaaaatattgatttacatattcatcaattaataagaaactttggtcaaattgatttaaatatgtgcctatatacttgattgcaccgtgttcaacatatattggataattgtttgaagggtatgttgtttgtaatttcatgattacacctcaattgttcttgttgttaaaactcaatatttaattgtctgcgctcaataatttgttgtttaagttgctcaatatgatttgattggaattcttccaataatgcttttgcaacttcaaatgctacgacatgttcgcagacgatacttgctgcaggaacagcacaactatcagaacgttcaattgttgctttaaagtcttctttagtattaatgtctactgaatttaatggtttatataacgttggaattggtttcattacaccattaacgattattggcattccatttgacataccgccttctaaaccacctaagtgatttgacccacgataatagcccaattcagtattgtagagaatttcgtcttgaatttcgctaccaggcttttcagctgctttaaatccttctccaaaacttacacctttaaatgcattaatactaacgacaccctgtgctattctaccatctaatttacgatcataatgtacataactacctacaccaacaggcatattttcaactacaacttgaactacgccccctattgaatcaccatcgtttttcgcttcatcaattttatcgcgcattgcttgtgcgataccatcatcaattacacggacgtcatttcgatcaaggtttgctttaaatgtttctgaatcataaaaatctttatctttaatgccacctatctcaacaacacgactgtatatttcgatatctaattgttctaataaaactttgcatagtgcaccgaccgctacacgtgctgctgtttctctggcagatgaacgttccaatacatttcgtaagtcacgatgattatatttcataccgccaactaaatctgcatgtcccggtcttggcttcgtaattgtacgtttcatattttctcgttcttcgtcgcttattggcgcagcacccataatttttcgccaatgtgtaaaatcatcgttagtaacaaccattgtaatagggctacctaatgtataaccatttcttacacccgaaacaatctccactgtatctttttcaatttgcatacgacgtccacgtccgtaaccgccttgacgcttaaacatttctttattaatgtcctcaaccttaatttctaaatttgcaggtacaccttcaacaataactgttaattgaggtccatgtgattctcctgatgttaggtatctcatacacactcgctcctttcatacttccacgataacattataatatgttgttaatcttatcatattcattgtgcattcataaatgtttgttttcaagctcaattaagaaattgatttatatctctttttaaatgtcagaattatcttaatattaaacgaactaagattcattataatatattcgtctgtagaaaagtataatgaatttctaaacagttgcatcatataatcattaattaaaaatgattagccgttttaatataatcgtatcgcaactttagcaaataatatactgactacatttcttaatacaaaagaacgaactgttaattattaaaaaagttaatcagtccgtttaaaaaaattatgatattaaaaatatacatatgttaagcacttttgttatactttgacttcaaaaatataatcaattcttttactaatacataaaaaatataaatgagagtcagtataaaaataatttttgttataggattaagtggtttatctaaaaatatagcaccatatagtaattccattaattttaagaacattaaaatccccaaaataatcgaaataatattcttcattttaacaaccccttctctatgtttagtttcttttgataaagaatatttctctctttttaatacgtgttaccaaaaaaactataaaatttttcaagtaatttactacaacataaaaaacgggccttgttatgtataatcataatgactaaccacataacaaaaccctttttccttttataaatcagaaagatttatagcttatattttattcgtataaccaagcatcacgtggtgaagcatagctagtaatttcattttcattaaaccataaattaatttcacgttcagcagactctaatgaatctgaaccgtgaatgatatttctaccaacagttaaacctaaatcacctctaattgatcctggtgaagcttctgaaggattggtgctgccaataatatgtctagatacattaactgcatcttcaccttcaactaccattgcgaacactggtgctgatgtaataaatgaaattaaatcattataaaatggtttaccttggtgttcaccataatgtgtttcagcaagttccattggtacttgcattaatttaccaccgacaagttttagtccttttctttcgattcttgaaattacttcaccaattagatttctttgtactgcatctggtttaatcattaaaaatgtacgttccactttatgtatccccctgtgtttaataggtttatgtatattactattatatattaacaggttggtaaagcgctttcaatacttttcataaatactatgtgtttcttgaacccatttttttcgtcaaacttaaaagtagtgatttcggatgtccatctggtaactcagaaatcaaatctaaagctttacttaaatacttcgaacttactgccttagcctcatcgatgctgtcagattttctaatgatttggatacattcttcaaattctttgcgttcactatcacgacgtaattgttcgattttcaatttgaagtctggatttttacgcatttctaataaaatcggtaacgtaatatgaccattaagcaaatcacttccgaccggcttacctaatttcttttcggtacttgtgaagtctaatacatcatcaatgatttggaagctcatacctatatagtgaccaatcattttcaattttcgtacagtctctttatcagattgagaagtaattgcaccaacttcagttgataattgaattaacagtgctgttttgcgattgatacgtcgtaaataattgataattgtctgttgactgttaaattggtcttgaaattggaaaagttcccctctacaaacatcaacgatagattcagatattaattgatgtacacgattatctttaacggccattaagtgttcaagtcctaatgccaataaaaaattcccagttaaaatagcagttgtctgatcccatttctttgatatggttaacttgcctcgacgcttgtcgcttttatcaataacgtcatcatgaacaagtgttgccatatgaattaactctaatgcgactgcaacttgatacgtttgttcagacgtttgttcatctttgccaaattggctactcagaattacaaaatgctgggcgtactcttttaccaccagaagacaataagtgtaatgatgcctgttctaatacagaatcttttactttttattgccttttcaagtcgttgttccactttcttaatttcattgttcatgtttaactttgccacgttaatcacctttggtattatctttttctttatagccaaggtgcattgcagcaacgccccctgtaaaactacgtactcttacatttatgaaacccgcttcttcaaacatgcgcttcaactcttcttttccaggaaaattaaacgtagattgctgtaaccattcatattcttcttttgattttgcaaataattttccaaaaataggcataacaaatttaaagtataatgcatacatttgtttaaagactggcaaagttggttggctcgtttcaagacataccaccataccacctggtttaagtactctattcatttcttttaacgcgactaaatagtctggcacattccttaatccaaacccaattgttacataatcaaaagaattgtcttcaaacggcaattccattgcatcaccatgaacaagtttaacattttccattgaagcagttttttcttttcctacttctaacatattctcactaaagtcaataccagtaacttctcctgttggttctacagctttgcttaatgcgattgtccaatcaccagtaccacaacaaacatctaatgctttcgtaccttttctaacacccatgtctttcatgacgcgttttctccatactttatgctgctcaaaactaataatattatttaatctgtcatatttttttgaaatattttgaaaaacgcgatgtacttgctctttatttgctttattgtcagccatgcttaattacctctactttttaaataacttttttggatatcgtgtaagtaatgctttacttcactttgattatatttcttgaagtatgatggatagtaatcagacatatcttcaaataaataattatatatttccgactcatcaatattgataccgaaatgagataacgtaatatatgggaaaagtgtttcaatttttactattgcttgagaaatttcataatcatttaaagcttgatgatgtaatgaagatttcaattcattaatttcaacaattgctttactaatttcattttgaaatgataaatcattgatttctgctagtagcgtataaaaatgtgcactaattaaatctccaatcaaaatggaatgcttagacaaatgattatatgtaatgtcatcaaggtgtctcattgatgtgtcaattgtgaggcatgctactttggcaacatctggaatatcatatgaatcgagtaacttacctaaccgatgattaatattaatggattcatattctgatacgccctttaatctttcttctatttgtctttccaatttgctaacagttgtttccatgtctacacctcacgttattatcactattcatattaacattatatgtaagaaattaaaatcttttgaagcattaagattacttatcatttttaaatttcaatttaaactaacagtaatttatgtagcttttgtaattctcataataacccttacttcatttacattattcatcattttaaataacgtaaaatactatagtagacatggttaccttttaagtaaattcaacgctaacaattaatctcattattcatatgtatattttgtagttgctatttttatcaaaactatgatgtcatgtaatattttgaacgcttaaacaatgaatgttccaaagattaaaaacttagaagaacattacaatttatgtacaggttgtaagtattaaaagcaaaataaaaagcccttattcagggctttttaagtaaaattattttacagcatcttttaatgctttaccagctttgaatgctggaactttacttgctgggatatcaatttctttaccagtttgagggttacgacctttacgtgcagcacgttcacgtacctcaaagttaccgaaaccaattaattgtactttttcacctttagcaagtgagttttggattgattcgaatacagcatctactgctgaaccagcttcttttttagttaaatcagcttgctctgcaactgcattgattaaatctgttttgttcattagacattcacctcctgaggtttgataatgatatgtttatatcattatggtaaaactttaacacaagcattacataaatcgcaatcatttatgtggcaaaaacgttgaatttaagccatttctattcattttacgtaattattagctgtatatgtgtaataatacacattttattcagattttttatcgcgctccattaaatcttttacgcattcttttactgagatattttcaaataatactctatataatgcatttgtaattggcatatccacatttttttctttagctaaatgataaacagatttagttgtataaataccttcaacaaccatattcatttcagataatgcttgatccattgattcaccttgtccaagtttatatcctaatgtgaaatttcgagaatgtgttgatgtgcaagtaacgattaagtcaccgataccacctaaacctagaaatgtcataggatcggcacctaacttttcacctaatctgctaatttccgctaagccacgagtcattaatgctgcttttgcattatcaccgtagccaattccagctacgataccacttgctactgcaatgatatttttcaaagcaccaccaagttcaacaccaaccaagtcatcattcgtgtacacacgtaaataatcattcataaataaatcttgcgttaatttacttatccttttatcttttgatgatgcagcaactgtagttggttgctttactacaacttcttccgcatgacttggcccggacaacacgccaatacctgcattatattcaggtgaaatagaatcttcaatcatttctgacacacgtttaaacgttccattttcaatacctttagcaacatgtataaaagtctttttagatgtcagcttatcattaatttgagaagcaacttctcgcattgctttagtaggtaaagccattaagtaaatatctgcaaattgaattgctttggtcatatctgatgtagcgatgatgttaacatctaatttcgcatattttaaatactttttatttgtatgacatgtatttaattcatcaacagcatcttgatttttaccccacatcaaaacatcatgtccattttctgcaagaacattggcaagggctgtcccaaaacttcccataccaaaaacggtaattttagtcattgttatcccccaatcgttaatttctctttcgagctataatatgaattggtgtaccttcaaaaccaaaagcggcacggatttgattctctaaatagcgtttataagaaaaatgcattaattctacatcattaacaaatacaacaaatgtcggtggttctatagcaacttgtgttgcataaaagacattcaaacgtctacctttgtctgttggtgtagggttcatggaaattgcatcagtaacaacttcatttaaagttgaactttgaacacgttttttatggttttcacttgcttcattaatgtaagggaataatgtacgtaatcttgtgcgttctttagcagacacaaaagcaatttgtgcataatctaaaaattggaattctttacgtacttcatcttcaaatttcttcatcgttttactatctttttccacagtatcccatttatttacgacaatcacgactgctttaccttgttcatgtgcatatcctgcaacacgtttatcttgttcaataatgccttgttctgcatcaatgacaactaaaacaacatttgaacgttcaatcgcttttaaagctcttaatactgaatatttctcagttgattcatatacttttccttttttacgcataccagcagtatcgattaaaacataatcttgtccatcataactatactctgtatcaatagcgtctctcgttgtccctgcaacattagaaacgataacgcgatcttcacctaaaatagcatttactaaacttgatttacctacgtttggtcgtccaataatggatagtcgaattgtatcttcatcataaggatcttcttcctcttcaccaaaatgagaaacaactgcatctaacaagtcaccaagtcctaaaccatgtgaccctgatatcggatacggttcaccaaatcctaatgaatagaaatcatacacgtctgtacgcatttccatattatctactttgttaaccgctaatacgaccggttttttagatttgtataaaatttgagcgaccatttcatcgctttgtgtcaatccttcacgcacgttaaccataaaaataataacatccgcttcatctatggcgatttctgcctgcgctctaatttgtgtttggaatggtgcatcaccaatttcaataccacctgtatcaataatattgaaatcatgtgttaaccactcacctgaagaataaatacgatctcgtgttacacctggcgtatcttcaacaatcgaaacacgttctccaactattctattaaaaattgtagatttacctacattaggcctacctacaatagctactataggtttagtcataagctaacttcctctctttcttatatctttttaataatatcacatgagactgtgtattcaaaatgagtttattactgtaatgataaaaatcagcacttaaaactttatcttataaaacacttagttaaatttgtccacgttatcattccgaatatattttgttacataaaaatactccacatgcaatcataaacatgtggagtttactattaaatattaaattatagtttaagatttttaagtttatcaccaatcatatcgccaattgttggattatcttcttcttcgctttctaagtacgccttagtcgtagaaggatcactttcaacaacatcttcgtttggtaatgttgctttaatagatagtgatactctttcattctcttcatcaatacctaatattttaacatttacttgttgaccaggttctaatacttcacctggcgtaccaatgtgtttgtgtgcaatttcagaaatatgtacaagtccttgtacacctggtgcaatttcaacaaatgcaccaaagtttgccaatcttactacgacaccttcaatgacatcattttcgcggaattgacctttaatattttcgaaaggtgttggtaacgtatctttgattgataatgaaatacgttctgtatctctatcaatagatttaattttaactttaacatcttgaccaattgaaacaacttcttctggtgtttgaacatgttcgtgagaaagttcagatacatgcactaaaccatcaacaccgccaatgtctataaatgcaccaaattgagttaaacgcgctactttaccatcaataacatcgccttcatttaaagattgtaataattgatcttttttagcatcgttttcttcttgttcaactgctttacggcttaaaatgactctattattttcaggatccaattcttcaactttaatacgaattgtttgtccatcaaacacagagaaatcctcaatgaagtctgttgaaattagtgaagccggaacaaaacctctttgtcctacatcaacaaccaaaccacctttaactacttctgttactttcgcttcgatgatttcattattatctaatttttcttgtaaataactataagacttctcagtttcaagttgtcttctagataagatgtaagctccagtttcattttcttcatcaaactcaactttagtgacatatgcttcaacttcgtcgccctcttttacaacttcacttgggctatcaatatgatgcgtagatagttgactaataggaataatcccattaaatttaccaccgttgatatgaacaacaacttgcttgtcttcaacttgttgtacctcgccagtgactttgtcaccttctttaatatcgttaatcattgattcattgaattcttcagtcatcttgtttgcctccttatacactacatatttataacatcttataaactgacagaattgtcaagaaattctacctttattacatttagtaaattagttgcatccataaatatgtcacttaatctcattctgtgtattagttggacatatatttattacaaccatatattcaaacaagtaataaagtccgctatgtttatacatattttttgtataaaaattagcatagcttactattttgtattataagtctgtcatttcattgttctctacaagatatattatagtaaaattttatacttttataaaacaaaaagccacgcaaataagcaacttttacatttgaatagtaagaagaccgtatatagtgcatctttctcgaattattacataggtcattttttgtgactaaatcagctgcttttgcaatacttagatttttaacactcattttcttaccatttgtaaaaagctttatgaatgtaatgaattatttttggaattctaataattcacctttattatttctttttactttttgaaaaacttacacaattcactgacgcattaacttttaccaaaaataaaaaggcaactttcattcatcattgaataaaaatcaccttttaagttgagtaaatcattatcagcacattcattttgtatatgcgttaagcgttgcacattacaaatagatagttatgacttattagattatttaattttactcaccatcgctaaaatttcgtcagtaacttcttcaatcgacttgcctgtcgtatctaatgtcactgcatcatctgcttttcttaatggtgatatttcacggttcatgtcgtattgatcacgtgcttcaatatcacgttttaaatcttcaaaatttgattcgatacctcttaattgattatctttatatcttctttctgctcgctcttcaactgatgcaatcatatatacttttaaatctgcatctggtagcactacagttccgatatcgcgaccatccattacgatacctttttctgcagctaactctttttgttttttaacggcgaatgaacgtactggctctttagatgcaacgtatgaaacatgttgcgtcacatcattatttcttaaaaagtctgttacatcttcgttatctaaaatgacacattgacctttatctgctttataagttaaatctaatgttgtttggtcaactagttttgcaaagtcctcagttttgtttaattttaaatatttgtatgttaatgcacgatacattgctcctgtatctacataaatcattgatagttcactggctacacgtttcgcaattgtactttttccggcagcagctggaccatctaatgcaatattaatggctttcatgcgtcatttcccttccttgtcgttttatgaataatattttatcataattaagtaaatgaaatataggaggaaatatatgaaacatctacttgttattcatactggtggcaccattagtatgtcacaagaccaatctaataaagtagtaacaaatgatattaaccctatttcactgcatcaagatgtcataaatcaatatgcacaaatagatgaattaaatccttttaatgtaccatcacctcatatgacaatccaacatgttaaacaattaaaggatattattttagaagcagtaacaaataaatattatgatggtttcgttatcacgcatggtaccgatacgttagaagaaactgcctttttacttgatttaatattaggtatcgagcaacctgttgttattactggcgcaatgcgctcgtctaatgaaattggttctgacggattatataattatatttccgctattcgcgttgcctctgatgaaaaggcccgtcataaaggcgtgatggttgtatttaatgatgaaatacatacggcgcgtaatgttaccaaaacacatacgtctaatacaaacacatttcaaagtccaaatcatggtccgctaggtgtattgacaaaggatcgtgtgcaattccatcatatgccatatcgccaacaagcattagaaaatgtcaatgagaaactaaatgttccattagtaaaagcatatatgggtttgccaggtgacatttttagtttttatagtcgtgaaggtatcgatggtatggttattgaagcgttagggcaaggcaacatacctccaagcgcattagaaggcattcaacaattagtatctttaaatatacctattgtgctagtttcacgttcctttaatggtattgtgagtccaacttacgcatacgatggtggtggttaccaacttgcacaacaaggttttattttttctaacggcttgaatggtccaaaagcaagattaaaattattagttgcgttaagcaacaatttagataaagctgaaatcaaatcatattttgaattataatgattacttaacataaaaaggtctatgtacaataattagtcatcaacctcatttgacatatcatgaatgtcagtcgttgtaaaactaagttatttagtacatagacctttatttttatgattctaacggcgtttgtttcttagctagcatgctttgagcaataatgccaccgtggaatttaccattctcaataaaaatggtattcgcatcgttccctgcagcaatcacacctgcaatgtagcaattttcgatatttgtttcgtatgtttctttattatacataggcgctgttccaaattcatttgtattaatttgaatgcctatagattttaaaaattcataatcgggatgataaccaatcatcgcaaaaacataatcattgtgtatcgttttactttcaccatttacttcataagtcacagtatcttcagttatttgggtaacattagcattaaattccatgtcaattttttcatgatttactaatgctgtgaaatttggaagtatccacggtttaattgaaggcgaataatctccaccacgatatagaaccgtcacgttagcaccagctttttccaactccaaagcagcatcgatagccgaattcttaccaccaataataacaacatcttgatcaaaatacggatgtgcctctttaaaataatggaacactttaggtaaatccgcaccttcaacttctaatgtattatgctgaccataatagcctgtcgcgattgttaaaaatcgacattcataaacatctttcgtcgtagtaattgtaaatttattattcatttttttaacagttaatacttcttcaaatgcatttacttttaattgatgatgttttacaacttctcggtaataaactagcgcttgattacgtcttggtttactttcttcaacgataaacggtacgtccccaatacttaatttatcacttgatgagaaaaatgtttggtgagtaggataattgtagattgattcaacgacattacccttttcaataattaaggtatcaataccttttcttttttgttcaatagccgcacttaatccgcatggccctccaccaattatgatactttcaactttttgcattgtttcggcctcctttaatcccaaactattataacagttcagtgattgatgcgctaagtctgtgcttgaagatttatgatatatttttgacaatttgtttaatgtgcatagagaattgttagctacggagttgaatagcactacaatttaatatgttgatttattttttattcttcctcgttaaatttgttgattgtggtgttttatctttttgatgactatttaaaaagtttaattgatatgtcaatatttgagacaacaccttgttaaataacaaactttgaaaaatgaaaaaactgctacatccttataagcgcaatttaagttctctaaaatatttagagatactttataatatgcacgtttgtatatagcagttcagttacaatttatatagttatattatggaataacgatttgttgaccgtttctaatattgttaccacttaaaccattggcacgtctaattttttcaacattttccggtgaacctgaaccgtagtattgaattgcgatacggtataagttttcttgaccattcactgtatgtctttggccaccaccttgacgttgttgttgctgttgttgattttgattagcttgttgttgattttgattattttgtgcttgattgttcgcttgattagcgttgttttgatcattatcagattcatctttagtcgctttgtcttgatcatcttttgatttatcactgtctgtagattttgatttatctttagaagcgtctttagatgtgtctttgtctttactttcatcagcattatttttatttgtattcgcgattttattttcttttgtaccattattatgattgtttaatgccatgcctccaaatatcgctaatgcaccgataattagtacagctgcaattaatggtaacaatactttggccatgccaccttttttacgttctttatctctgtcatgatggtcatgttcatcatggttttggcttgcattattagaggcatgtggttttgaagcggcagaagcacttttacttgctgcggctccagccaaacctgctgttccagcaccgatcgctgcaccttttttgccattatgatgatctttagacttatcttgagacgctttatcctcagtcgagttattcgccttgccagaattactttttgtttttgaggcgtcatttgaatgtttcttagctttagaatcagccattgcacctgcaacacccgctgttccagcaccaattgctgcgccttttttaccactatgatgatctttagattcatcttgatcttgttttacagaatcattatcatgttcattttttgatgtttctgattggttagcacctgttgtaaaatatggtttaggttgctgagattgttcagctttactcttattagaaactgttgaatgctcagtgttattttctgcatctttaatagtctcgtgtttatcattgtcttcgattggttctggatgtgatttatccattgcaaaagcattcttattataatattcctcttcatgttgaggtgtactgtcttgatggctaggttcttgatttacagaactatgcgctgatgattcgacttgacgatcatctaatgtgccagcctcattgtgagcattgtcgtcagatgcttgtgattcatcgtgatgttgtttgttatgatttgttgctaaatcacggcgtctttttcttctttgggcatttcttggcggaaactgttgctccgtattctctattgtatcctgatgttctaattctgattggtctttttcaacatcttccgtatggtcttgatgtgaatttgtgtctatcgattgacgatttttttcaaagtcatctttaaaattattagacatagccatcttcctttctattctattacaatgattttacataaaatatacccacatgacatatgtttatgtatatttttcaaaattatttcaatcatttttcaattgtgtatacactaattatagcttgtcaattttcttttagtaaagtaatactatctgagaaataaattttgcaacttttcatcaaatccaatacttctaattaccttcttcttatttaaaattacgatatcagttatattagaatcattgtcacaacatcgatcttgtgccggtggatattcaccgaaaaattctaataaatacttccgtctacattgatctaatttgcaatagccaatcatgcgaaagaatcctaattgctttcgtttaaatgattgcttaaatatctgtttcaaggcgccgatactatagaatgaatgcaacgttgtcaaaacgtcttgtttatcgggtgctaaaaattctcctatttcgaaattttgtacatcttcttctgttatcatatctgcaaataataacgtttctaaaatatatttatcgtccggttgaaataaactaattgcctgacttagttcaccatcgcgacccgcacggccaatttcttgaatgtagttagaaggacttgttgaaagatgaaagtgaatgattgtgcgaatatcttttttattaattcccataccaaaagcactcgttgcgactataatcggaatatcattatttaaaaattgttgttgaactgtgtgtcgctcttgataattcatatcaccatgataaatacctgtaagaaaacctgaatcataaataagttgcgctaaattcagacacatctttttcgatgagacataaataatcgttggtcccgactgttgtagaaacggcagcaaccattcaattttatcttcatcatcatgaaaattaagatgcttaaagcttatgtttgggcgattcattgtagttttaataacattgaattgaatcgctaacatttccgtcaaatcatcttgtaaatgcggtggtgcagttgctgtcaatgctaagacaaccgcttctttaaaatgctttgttacttttcctattagagcataatgtggtctgaaatcatatccccattcagataggcaatgtgcttcatctagaacaatcatgccaaagtctatcatagatattaatttaaaatttgacggttgcaggagaaattctggacttagaaagatgaaacggctatgtcgtaaacatttaatattatgctttttctcaatttcatccataccagagtgaatacatgttacacgtttttctccatttattttcaactgcataacttggtcatccattaaagatattaacggtgagataattaatgtcggcttacctgataaatacgtaggtatttgataacacaaactctttccacttccagttggaagaatacctagagtgtgctgttgagacattatactttctataatttcctgttgtcccggtttaaaattctcgaagccaaatttgtttcgtaaaatatcatgcaacattcagatcacctctttcaaatccaacgattaatacttttaattgaaaatatgataacgtgtcaaattgttctttgtaaaattttaatcgttcgccacgatgttgttgataaaaattcaaaaactggagttgatcttctagttcaacataatcatcgtaattagacatgtaacctttgattaagatttcaagtacatgatcttcgatagtattgattttaacttgttgttgagccgctatatcttccatcgtgaattgttcaagcaattttgtataagtaatataagtttgatttaataatgtaggtttcattattatttttgataaaatagtatattctccactttctaattcaaacatcattgtcactaaattattcatttcgtattcaaacaattgctgttgagatagcttttctattaaactaacttgctgtctcgtatacattggttcatcatagccttgcaaataataatgtaagtaacatggcccttttaaagttattgctttaaacaagttatgtagttcattttcaaaatcaatttgtaattggttttctttaatgtagttatagacaatctttacagtttcttgtatcttattattttgagagattggtacaaaatgaaaaacatgttgtttggtattagacatggtttgcactaatagttgaattgcttgaaatgtttgccccatgctttcaaatgtatatctaggatgcaacatgatttccatttcagcattaaattcattgattttttctaaaaatagctcaaaagacggatattttaatagtggtaaactgtgatataatgacaactgttgttgactacaagcgtcaaaaaaggtttggtgagatttcttaccaactaagatattgtaaatacttttatttgttttatagttaaatgtttgttgtaatgctgtttttataatgtgttgcaaatttaaccctcactctgtaaaacggataatttgaaaataaaaatgatgctgtctaaaattttagtcacattactattttagcatttttatcaaaggaggcgaagacattggcaaaatatacaatcgttgatatggatacttgtattgcatgtggtgcatgcggtgcagcagcgccagatatatatgattacgacgacgaaggtattgctttcgtaatccttgacgataaccaaggtactgcagaagtacctgaggaattatatgaagatatggaagatgcaattgatggatgccctacagattctattaaaattgcagacgaatcatttgatggggacgctttaaaatttgaataattgattttttagacaaatgttccatagaaaaagcaggcaagctatcgtttattgatagtcacctgctttttattattatgtgtatattattttgctttaatttgattaaattcttttcaagaaattcgcaagccttctatatagtaatataaatacaattgaaatgacgatacctttaataatattgaatggtataattcctgaaacaatgattactttaagattatttacgatatcagctaagttaaatatcataccgtacaaaggtaatagaacgaaatagttcaagatactcaacacgatagtcataacgattgttgaaatgattaatccagtaatcaaagattttgttgaacgtttatttttatagatggcgtaagcagttaataagaaacttgcgcctgctaaaaagttagcaaatggtccaactggatcgcccatactaaataagtagttcaataaatttttaaccagtgcaactatgataccggcaactggtccaaacgtaaatgtagctagtagtgacggtacatcactaaaatctaaagttaagtatggtggcaaaaatggtataggaaacttgataaaagttaacacaaacgcaatcgcgctcaacatacttattgtgataagacgtttattttgttgcatattcaattttctccttccattcatctcgtaagaataggaggattattgcacaacaaaaaacctccatcttctcccatccagactatactgtcggctctagaatctcactagatcagccactaatatgatacatactagcaggtcgcaggctttatttactgccggttgggaattacacccgaccccgaagatgaattttacattattaaatttaattctcattaattttatactatatatcacaaaacctcaataactgtgctttaattagatcatagttacgtaattggagagtgatacattggtgatttgcgagcaatgtttggaatgttgtttgcttgattgttttttgagatggattttgggacggcttttttgaacctacctttttattgttattagtttaatcattcgtgttagttttttcatgattaaatacacctacttctattacatccttcttactatagttaggtctttttgtatttatatatttattagaaatttgaagagaaacattcaaatcacgaggaatattctttttcttttttagtacttcagaaaaatcaatcatctcgtctattgtattatctttagtaaaattatctttagtactaaataaagttgtaacaatatatggacgagatttatctttaagttgtttttttgagtttttcataccgtccctaaaagacttatcatcctctttgattaagggttgaaaatactttttatattcatctaaagtatatggaattgcagtcaaataataatactcatttctaaaaccactattctgcgttttcataattgcattttcagtataaccagtatatttatatttacttttatattcttttaaaacttctgttaaattatccaactcttccttatgtgctcgatattcaaagccactcaacactgtaccaactaaagtactcatatcatcgcctttatccttacttcttaatgaactatcactgtcaataattgatttatcgaatggaatacttgcattaaatacgatgtcgtggtcatcacaatgcacgaatacttctacaccgtcgccactacctataacatttgtagctttaacttttagaccgaagttatccataaaaaattgttcgcctcgcttagcaaatttatctttatgcttcttcgcaaattcaatcgcatctttttctgcaggtggttggaagccttgtcctacatatttggaagcttccatttcttctggtactgattttgtttctttattcgattcgttttccattatggaacatcctgatagcagaactgttgctattaaggttaattttgcttttttaagcatatctcatcacccatttatgcgcttttaaaactttcattttgcaaataattatactctcttaatttatttgcgccttatagtttctctctgtataaatcttcaaatacatctacttgcgttaaacaatgtctgatttttatttaattatccgttgatttagcattttgaagccaatcatctccattacctaaagatttcaatgggttattaggatttactgcctcatttgaagttccttaatagtttattatctgttgaccagttagattcccctgatcatcaagaaactcgtatatttctatattaaggtgtacctttcatattatgattttctatttgtttgaaccgttttccatttactttaaaatctatcattcatttatatctttataaacccaataaccgttcaattctgctatatctccatcatttattttattcactttatattcacttatccttcaattggatttatatcgtcataaaacggctttttagtatttatactaggttttcctaattgaatagtaacttgagatttttgaggcatattaggttcatcttttattttattactcaattcaatcacatcatctactgtattatctttagtaaagtttttcttagtagaaaagagtgtagaaactgcatcagtatttgcagtataatttagctcttttctagctcgttgcataccttctttaaattctttatcatttttatgaatcaatggttcataatatttacgatattcttttaagtttcttgataaatatgtaatataaaagtattcattttgatacccgacgttttgtgtcttgttaattgcctcgtttgtaaaacctgtatattgatacttcttttcattttctttgaaaaatttatataaattatcatacttttctttttgcgctcgatattcaaagccactcagcactgtacccaccatcatactcatatcatcaccgttgtcattactacgcattgaacctttttgatggatggcgtctttgtacaaaggtagacttgcattaaatacaatgccatgatcttcacaatgcacataaacttctacaccatcatctttacctacaacattggtagcctttaccttcagtccaaagttatctttaaagaattgttcacctactttttcaaattctttacgatgcttcttcgcaaattcaatcgcatctttttctgcagatggttgaaagccttgtcctacatattttgaagcctccatttcttctggtacagattttgtttctttatttgttttatcttccatcgtggaacatcctgatagtactagtgttgctattaagattagtttaatccttttaaacatagctcatcacccatttatgtgtttgtttagaatattaaaagcatttttttaattttattcatctttacgatacaccccatattctattggatgattatcatcataaaaggcttttttagtattaatagtaggcttccctatttgaattgtaattgtagatttttctggtttatttttaaaattatataatttatcacttagttcaatcacatcatctactgtattgtctttagtaaaatttttctttgtactaaacaatgtcgttactgcgtctgtatcagcagcataattcacttcttttctggctcgttccattccttctttaaattctttatcattttttcgaatcaatagttcataatactttcgatattcttttaaacttctagaagagtatgtaatataaaaatattcatttttatatccaacattttgcgtcttgttaattgcttcttttgtaaagcctgtatattggtatttctcttcattatctttgaaaaatttatataagttatcatacttttctttttgcgctcgatattcaaagccactcaacactgtacccaccatcatactcatatcaccacttttgtcctcacttcttaatgagctatcactctcaattatcgatttatcaaatggaatactcgcattaaatacgatgtcgtggtcatcacaatgcacgtatacttctacgccgtcgccactacctacaacattcgtagttttaacttttagaccgaagttttccataaaaaattgttcgccacgtttagcaattttatctttatgcttcttcgcaaattcaatcgcgtctttttctgcaggtggttggaagccttgacctacatatttggaagcttccatttcttctggtactgattttgtttctatattcgtgtctttacttgattcattttccatcgcggaacatcctgatagcaatagtgttactattaatatgattttcgcctttttaaacatagctcatcacccatttatgtgtttgtaaaacttttatgtttgaaaaagctacttattctcaatgaaaacaagtagcatttaataaattaattagtatacagctagtttttctaattgttctttaacttgaattaagtttgaccgtattagagaggcggattgatccatcgtttgaattgcttgtccttcattttcgttcaagccattacaaacaacttcaaactgttgtgccatttgatcaagacgcgcatgagcttgtgtgtttaaaataaacatatcgtcataatgtgatggttcaaatatcatttgtacaatcaaaggcttcatgttcttaacaatatcatctaaatggttatctaaaattggtgacactgcttttaaatcattaagaaaaggctcccatttgcctaaagtattatctaattcttctaatttagttttaatataattacaagttacattaggaatcagggacaaaaattctttcttttttacatttaacatttcaattgcatgtcttaaattcttacgtattttgggaattgtattaatcaaatattttattacatcgacaattttcgatgcatattcatcatatataccttgaacatagtctgctatttttttaataccatcatcgatatggtcttttaatattttcatttttcttcctaaataattagaaggtaaagctagaccctgcaccatattttcacagctataattaatttgataatttccatctaaaattgttgcatcttgttgcttcataatacttctaatatctgcaatttgcctaccataaatatcattttgattttttatttgctgaatattctgttttactactttcaaatgtttcatcatttcttcagatactccatccttgaagtcatgatcaatatttttgaaaatttctaaaatttcattatctatactatcatacactttttctataaaagattttatacctttaaacaactcattaattctttcttttaatgcatccaatgcaaaatcaggtaataagtgtttaacagcactaatactttctattgtttcatctgcaacttcttcaagtgagtttattttactaattaaagttctttccatttcttctaattgaaataagttaatcttatccttaaatccttctgataattgtttctttctatctgcaaaatttttattttcattttctgagatgttaaaactttcatttaaaaagattacgcattctgctaacataccactagtttcaccagtaatcagtttactcaacgcatcaagattttctaaattaagtttaattaaagttcctcttccagaacgtgcaatcgaatctcctgtccaaacatttattggaattcgcccatccatatctaatgttatgttaatagtcttttttactttttttccatttttaatttctgtatcttttaccgacttaattttgattagtggtacagtatcgtatgtgttatcttttctatttaacttccttttataacctacatggctgtctattaaagcatctaacctgggcacaccatcactaatgttaacgcgttttcccggcatatctttgatgaatggatcttgtaaccatgttaatagatcgttggtactattaaaactaatcatattatcaaagcgtggtctagcaaatttctgccaagcagcataaggtaccattgctgggtcagtagcaacaactttttcatttggatgtttcgctccttgatattttgctcctgcaccgccttccgaattaccgccatccgccacaatggttttgtttttgaagttacttgattccattctatatttttttaaaaaatcactatttgataatctatctgcatcttctaacttttttttatattgatttgataattgatctgtttgctttaaataatctgtgctttcattatcattattcattaatttagcattttggagccaatcatctccaaaccccgatgattttaatggattatttggattaattgcctcattagatgttccttgataaattattgtctgttgaccagttggtttacttttatcatctaataactcatatattttaatatcagcagcaccattcaaattactattcttatcatcattataactgtctacttgtttaaacctttttccattaactttaaattctttttttatatcaatattttgataaacccagtaactacttaattctgttaaatccctatcattaattttattcatctttactgtgcaccccatattctattggacgattatcatcataaaaggctttcttagtattaatagtgggtttccctatttgtattgtgattgtagatttatctggtttattttttaaattatataatttgtcacttagttcgattacatcatctactgtattgtctttagtaaagtttttcttagtagaaaaaagtgtagcaacagcatctgtatttgcagcgtaattcacttcttttcttgctcgttccattccttctttaaattctttatcattttttcgaatcagtggttcataatactttcgatattcttttaaacttctagaagagtatgtaatataaaaatattcatttttatatccgacattttgtgtcttgttaattgcctcttttgtaaagcctgtatattgatatttcttttcattttctttgaagaatttatataagttatcatacttttctttttgcgctcgatattcaaagccactcagcactgtacccaccatcatactcatatcatcaccattgtcattactgcgcattgatcctttttgatggatggcatctttgtacaaaggtagacttgcattaaatacaatgccatgatcttcacaatgcacataaacttctacaccatcatctttacctacaacatttgtagctttaacttttagtccaaagttatctttaaagaattgttcacctactttttcaaattctttacgatgcttcttcgcaaattcaatcgcatctttttctgcaggcggttggaagccttggcctacatattttgaagcttccatttcttctggtactgattttgtttctgtattcgtgtctttacttgattcattttccatcgtggaacatccccctaaaattaatgtcgtagctaaaactgatccaatgaattttttcatatgacacctcgaataatttaattattacaatatatctatattttaccctatttttataatcaaataaataactttatcaaactttatatttttgtataaattagtaatatatttaatagttgatattcgcaaaaaccctaagtcctaatccacatacaaaattccccacatcaatcaaaaaacgcatgctataaattagagtctctaatcaataacatgcgttctgaaataactatattcagttttattccggctttggtagtttgataataaacgttgtgccttttcctaattcgcttttaacatcaatggaaccaccatgctcttcgataatcattttacaaatgaacaaacctaaaccggtaccttgtttacctcgcgttctcgctgcatcaactttataaaaacgatcaaatacttgttgtaaatgttctggtgcaatgcctgtgcctgtatctttaatgtataaaatatcttcgctttcattttcatcacaagtaattgcaatttcatcaccaggtttcgtataacgtgatgcattatcaattaagttcgttagtacttggtccattcgatccatatcataactccaaacacgcttcttacaataattaaaagtcatatttagacctaaatcatcagcttgttggcgatacttaattttcatcttatctagtaacgctgcaataggctgaatttctttatttacggataacccttcagcatccatgcgagcgacatttaacaattcattaactaaacgatttaaacgtttcgattcatcaaggacaatggcaagcgattcttttatttcatccggttctgtaacaataccatctacaattgattcagtatagccttgaagtaatgatatcggtgtacgtaattcatgtgatacattagcaatgaaatctttcttcatttgatctagattgtgctcattagtcatatcacgaactgtcacaacaacgccacttttacctccctgttcaatcttgtcgatatagcttgtggtcacaacaaagaatcgtgcattcatttctaaatcacgcatttcagtttgttttgatttaaaagtatcttcaatttgtcttaataagaaagctttggcatcttcatcaatattgtccataatatcattcgccatcttattcgataagataatttgtcgactctcattaatacctaggacaccttctaccatagagttaattaagctgtctctaatatttttagatgtggataatgcgtcgacatgctcttcgatttctgtactcatctgattaaatgcctgcgataattgaccaatttcatctttcgttgtgacagaaggtttataagagtaatccccttcagatacacgtgtagcttggtctcttaagcgtcttaaaggttttgtaatccttgacgataagaaaaacgcaaagactgttgtaattgttaagaaaataacagccgtaattatagtgataatcgtaatagcattatttgtatcttcgattgatttcaagtctttatatataaagactccactatatttgctatgactattcttctgtgcttttgttggatagcctaacaaaatatatgtttgagatgagcccttttctttaatcgttacatttcgagtaacagatttacctttatcaaacacatcgtcaaaatggtcgttgttgactacttcattcaacatttgctttttaatattagaaagtgaagctgaagattgacgatgtttattatttataatcattaacccaccagggttttcaattaatgtttgactatatttgattgcttcttctttattgtgcgattgttcgaccagtgaactaattcgtctagcatcttctcttatggcattttcggtttcttgtgtgaaatagtattgcataaaagtaattaacgcaatacttaataaaattaaaactgtcgtcactattaaaataatagttaaccacagtttaattacgacactatttagccggctcatcattagatttaacctcaaatttatacccaacgccccagactgtttgaatcatatgcgcagcttcgctagacacacgattcaacttttctctaagtcgtttaacatgagtatcaactgttcttaaatcaccatagaattcataatgccaaacttcttttaataattgttcacggtcaaatactttatttggtgttttagctaaatatattaataattcgtactctttaggagtcaaattaacttcttgattatcagcaagtacgcgatgtgcatcattatctatttctaaatgtttaaattcaatcacatcacgtgcgtgaggttcgctttgttctacagttgtagattgcgttcttcttagaagtgctttaactcttaagactacttctcttggtgaaaatggtttgacgatataatcatctgcaccagattcaaaaccttcaacacggtttgtttcttcacctttagcagtcaacataataatcggtgtttgtttatgttcacgcaatttagttgccacctggataccatccatttcaggcaacattaaatctagtagtatgcaagcataattattctccattgcaagttcataagcctcttggccattacttgcttcatggatttcaaaagattctctttctaaatacattttaagtaatcttctgattctatcctcatcatctacgataagtatttcgttcgacatacaggtcatacctcccacacatgcttttctttacaaaagtattatatcacaggaaagcgcatacagttattaaaaacctaaaattttgtgaaaaaattctcaaactttgtgataaatacatattttatttaattatttcccatgttctgctaaatgacgcatcacttttacttcatgaggcgtcaatacacgtccttcaccagcattcaaaccgacaacatttaaaggcccatattcaatacgagacagtttcgtcacttgatgaccaaaatgttcgaacattcttctgacttgacgattacgaccttctgttattgtaatttcaaccaatgttgtgtttttatctttatcttgtttcttaactttcacttcagccggttgcgtcataccatcttctaattcaatacctttttctagcgctttcacttcttctctcattaagtaaccttttaattttgctacatatttcttcttaatttgatatcttggatgtgtcattaaattagtaaattcaccatcatttgtaagtaataacaatccagaagtatcatagtctagacgaccaacaggataaatacgtgcttcgatatctttaaagtaatctgtaaccactgtacgtcctctatcatcagatacacttgttatcacttgagttggtttatggaataaaatgtaaattttgtcttctagttctattttaataccttcaacttcaatcgtatctgaaggcttcacttttgttcctaattcagtgacagttgtaccattcactttcacttttccttcagaaattaaagtttctgccttacgtcttgatgtataaccactgttcgctatacgcttttgtaatctctctaattctttagtcattattttctcctttttgattgactagattgctgaaaaaagcatccatttcttcatcgtcttcttcagttgttggcaaatcttctatacttgaaataccaaatacatttaaaaataaatcagtagtgattaattgttggctacgctgttcattgaccactttagcctcaactagtcctttggcaatcaatgttttaactgcaccatctgaattgatactacgaattaattcaatatcacttcttgataatggttggttataagcaataattgatagtacttccattgctgcttgtgataatttcatttgtgacttttgttcaattaattgttcaatgtacgttgccgcttcttttttagtcgttaaaacatacgtcgttccaaatcgttgtattattaatccatgtgatgaataattttcaattaattctacgagttggtctttcgatatatctaaaatttctaatagctgtttttcatctaaaccttcatcgccagctgtaaataatagcgactctaatataccgtgattatccaaaatggtagttcactcctctaataatgttaatatcttcaaaattacgttgttgctcaatattaattattcctgcctttgacatctctaaaatagctaaaaagtgagtgactacttgttcaattggctcagaaaacgtaaacagactaaagaagttaaaatgatctttatctttcaatctcgatgtcacttgttctgtagcttgttgaatggtaaatgtctcttttcggatttcaacagatttaggtgtatttaactcaactctatttttaactctttgataagctacaattaattcagttaagtcaatcgtatgatttggatcccaagattcatctgtttccaaatgagataaatctgtcggtctttttgtaaaataaaaatctctttcttctttcatgtcatttaaaatagcagtatattctttataattttgatattctattaaacgcccaactaaatcttcacgtgggtcatcatcaacatccatatctgatgttgattgtggtaaaagcatcttacttttaatcattaagagttctgacgctaatactaggtattcacttgcaatattaatttcaagctgtttcattgcatgaacgtactgcatatactgctctgttaatgcttgcataggaatatcataaatatctatttcaaatttttggataagatgcagtaataaatctaatggtccattgaaagcatctaatttaacttcatacataatatctacctcgtattgcgtcatatgtgcataattctctaaaatattatagcatgaaaataacttacttttaaattggggtgataacaaaatgcaacaggcactgataaatttctattatcaatttcatactaagcaacattatttcctatgtcatgacattttagaagatgcatggaaagctgaaaataactacagtaagcaagatgcagttgttagtttaatcttgtttgcaactgcttgttaccattatcgccgcaataatttaaaaggcgcctataagtcttttaataaatctaaagaaataatacaaaatgctaaagatagagatgcgttataccttaatttaaatgattatcagttgttaattgagcaacagatagcaaagttgaatacagcaaagcctttttcatcagttatattaccaataactccagactttgaacgcatcatcaaggccaactatccagattatgattataatcacgaaacagcaacagatccttttattgtagaccatcacatgcggcgtgatcgttcagaagtgattgcagcaaaagaagaagcgattcaattaagaaaacatagacgtaattaattaaccaatttaaaaaagccacaatagcacagacatttttagtcatgtgtattgtgacttttgagttattgttcactttatgctctaggatgaaattggttatacatttttctaatttgagattttgaaacatgtgtatagagttgagtagtagatatgtcagagtgacctaacatctcttgcactgctcttaaatctgcgccattttccaataaatgtgtcgcaaaagagtggcgtaacgtatgtggcgttaacgtctttttaatgtttgcctttacaccattttgtttaatcattttccatattgcttgtcgtgataaaggtttaccatgcatatttaaaaataagacttcggtaacagtcttttttaaaagttgcggtctaatcgtttcaatataagtagttaagtactcaatgactgcgtcgcctaatggtacaattctttctttatcgcctttaccaaatacgcgtacaaaccccattattaagttcacgttctctaactctaaatgtatcaattcagatacacgcattcccgttgcgtacagaagttctaacatcgtacgatcacgataaccattaattttatttaaatccggcgtttctaataaagccaacacttcgtcaacatttaaaacgtcaggcaattttttgtcatattttggtgaatctaataataccgttggatctttcgccgcatatttttctcttatagcaaattgatgaaaactacggattgttgaaataaatcgcgcaatagatttagcagattgcccttggtctattaaatgccccaaacactcttgaattaattgtcgatctataaaatcaatatgcgagatatgatgttcagtcatataatcttgatactttttcaaatcacgtctataagcaccaattgtgttagaacttagtcctttttcaatttgtataaaacgcaaatattcttcaataattgtttccataaccacacctctaaaaaaagcgaaggttaatttaacctacgcaatttactatcctttacctttagcttggcacgtttcacacacaccatggaaagttaaacgatgatctaaaattttaaaattgaactcattttcaactcgattttcaacttctggtaacaaatcttcatcgatttcatctacacgaccacattccatacatactaaatgatggtggaaatgttttgcgccttcttttcttaaatcaaaacgagcgacgccatcaccaaagttaattttgtcgacaacttttagttcagctaacaactctaacgttctgtatactgtcgccaagccaatttcaggcgctttgtcttttactttcagatatacgtcttcagcacttagatgatctttttcattttcaattagaactctaacagtagcttcgcgttgtggcgttagcttatatgatgattgttgtaattgttgcttaacgcgatttaatcgttcttccaacgatgtccactcccctactaataattaaaatcattacaaattatttcaaacttcacaattaaaactaacagttttctcaataaaatgcaagcttttctcatttgttatttagaatgattataatttaataataggtgttgcaatgcaatgatagtcttcgcatcttctatttctttattcattagcatcgatttaacattctcaatcggaactttaatgacttcgacaaattcatcttcatctaagtgaactgtgccttcttctaaattatccgtaaaatatattgataattgttcatcacaaaaacctggtgaaccatacatatctacaacatgcgttaactctttggcaatatatcctgtttcttcttctaattcacgcttagccgcttcgactctatcttcatcatcttctaatttaccagctggaatttctagcaatggtttttctactggtttacgatactgtttcactaatacgacttcttttttaggtgtcaatgcacaaacagcaactgcaccattatgataaactaattcccttgttgacgtttcaccgtttggtaatgtcactgtatgaatttctacatctacaattttgccattataaataactgttcgatcaattgttttttcatttaaatccattataatcacgttcctttaaattcatattatatattgatacactatgcttgttagctaaagtgtatcgaaaggagaacagacatgcaaaaaaatatattaaaaagtggtattgcattatctgaattaggtctaggttgcatgagtttaggtacagatttaaaaaaagccgaacaaattatagattttgctgttgaaaatggtatcacttattttgatacagcagacatgtacgataaaggtataaatgaatcagttgttggtaaggtacttcttaaatatcaacaacgcgatgatattgtcattggtacaaaagtaggcaatcgtttaacaaaagatggcagtacaacatgggatccgagtaaatcctatattaaagaggcagttaaaggttcactaaagcgtttaggtatcgatcatatcgatttatatcaacttcatggtggaactattgatgacccattagacgaaacaataagcgcatttgatgaattgaaacaagaaggaattatacgtgcttacggtatttcttctattcgcccaaatgtaattgattattatttaaaacatagtcaaatcgaaacgataatgtctcaattcaatttgattgataatcgtccagaatcattattagatgcaatccacaacaatgatgttaaagtattggcaagaggacctgtgtctaaaggattattaacttcaaacagtgttaatgtgctcgacaataaatttaaagatggtatttttgattattctcatgatgaattgggtgaaacaatagcctctattaaagaaattgaaagtaatttatctgcattgacatttagttatttaacatcacatgacgtgcttggttccatcattgtaggtgcaagtagcgtcgaccaattaaaagaaaatattgaaaactatcatactaaagttagtttagatcagattaaaacagcaagagctcgtgtaaaggatttggaatataccaatcatttagtgtagaagtcattttcagtaataaaaacagcagtatgaggcgtttcattataaaaatgccttactgctgttgtttatgtacaattcgctataatttatggttaagattactcacttatgatagaaattaaagcgttgtcctcacgcatcagtatttagtaatttcgccctgcggcagtgccttaagcaaacttctgccacttcatcttttaataattttattaaaacatctttctatatttcacttcgcatgttgattcatcattattagttattacttgtacacccagcacatttccttgcaacacaagtagtttgaatttttcacaagtataatataatgtactgtctgaaatttggtctacagaaatatcgcctaaaatatccagcactgtaaattcttcaaatactgatagttgttccgcatatcgtacacaaagtcttaccacactctccgattgacagttcattgccatcccacctatttatgctttatttttaaataatttagggaaacatcgttcaaaaaatctaggcgcaatttgatacattttcaacgcatgatgcatccatttaggccgattaatttccatttgttttgttttaatgccataaatgatatcttctgcaagctgattagcatcaagcataattttccccatctttttagcatacttcattgatgggtcggctttttgatgaaaaggtgtatcaattgggccaacattaactgtcatgatatgtaagtttggtgactctagtcttaaagcattcattaatgcataaaagcctgctttcgatgccccataatgtgcggcatttgcttgtgtggaaaatgcagcttgacttgaaatacctacaatatgtgcgttagatgttaaatatggtctcaacacggtatataaaacattaaaactaattaaatttagctgatacgtttcaatcatttctgaaaaactatggtctgaaatagatttgaaataacctaaacctgcactataaatgaatccatcgaataatgtattgtcttcaaattgcagtgcctgtatcgacttcaaatcatttaagtcacaaggaataacatttatagttttccccaattcctgttcaaagattctagttgctttatcaacatcacgcaccaacaacgttacatgcactttattttctagtaactttcggacaatcgaaaaacctaaaccactcgtaccaccagtcactataaaatgttgtcctttcatcaattaaccttccttttcaattatatagaatgcaatttatcaactttacataattgagacaagttgattatctttcctaatatatatacaataataagaaaatataacatacaaatcaaaaactaaagggatgtgacgttaatgaaactcgtattttatggagctggtaatatggcacaagctatatttacaggaattattaactcaagcaacttagatgccaatgatatatatttaacaaataaatctaatgaacaagctttaaaagcattcgctgaaaaactaggtgttaactatagttatgatgatgcgacattattaaaagatgcagattatgtatttttaggtaccaaaccacatgactttgatgctctagcaacacgcatcaaaccacatattacaaaagacaattgcttcatttcaattatggcaggtattccgattgattatattaaacaacaattagaatgccaaaatccagttgctagaattatgccaaacacaaatgcgcaagttggacactctgttactggcattagtttttcaaacaactttgaccctaaatctaaagatgaaattaacgatttagttaaagcatttggttctgtaattgaagtatcagaagatcatttacatcaagtaacagctatcaccggaagcggcccagcatttttatatcatgtattcgagcaatacgttaaagctggtacgaaacttggtctagaaaaagaacaagttgaagaatctatacgcaaccttattataggtacaagtaagatgattgaacgttcagatttgagcatggctcaattaagaaaaaatattacctctaaaggtggtacgacacaagctggccttgatacattgtcacaatatgatttagtatctattttcgaagattgtctaaatgctgccgtcgaccgtagtattgaactttctaatatagaagaccaataaaaacaaacccgccaacacatgtatgcatcatcgcaggcactgtgtttgacgggttatttttataaattattactatttggcaagcattgtttattactttgtcattagactttaaaactatcaaaatcttttacaaaattaaaatttggtgtatcttcattttgtatcaatgtttgataaatttcatttatatcttctgtattatagcgattgctcaaatgtgtaatcaacgtacgtttaacattggcttcttttatcaatgcaaatacgtcttcaatatggctatgatgataattgttggctaaatgcttttcaccatctatataggtcgcttcatgtaccatcacatcagcatctctagaaatcacacgttcattagaacatggttttgtatcaccaaaaattgctacaattggaccctgtttggactcacctctaaaatcttttgattgataaacttgaccattatgttcaaatgtatcatgagattttacttcttgatatttaggacctggttcaagaccaatgttttttaacgcttcaacattgattgtacctgtagtttcaggtgccattactctatatccatatgatggaataccatgattaagtaaatgcgcctctacagtaaaaccatcatgatgatatgttagatgatcatcgatttcaatatatgtaattggatagtttaaatgtgactctgataaattcatagacatttccacatatgctttaattccttttggtccaactaatgtaagtggcttttgttcaccgccctgaaaagaacgactagaaagtaatcctggcaaaccgaaaatatgatcgccatgcatatgagtaataaatatatgtgtcacttttcctaatttaattgcatgatgtaaaatttggtgctgtgtaccttcaccaacgtcgaaaagccatatggaattggaatatggttctaaatttaaggcgattgcttgtgtatttctctcttttgtaggcaaacctgcactcgttccaaaaaatgtaacttccatatatgcccctccttttcttcaattcattttatcataaaatttgtatcaatttagttttaatttatacttgaatcaaaatctgttaaaaattcaactttgctagttaatttttctaactttaacgtagacataactatataaattttgataattacgttatacttatcattaataagtatcacattaaacatgatacatgaatcgatatttcatttaagacactgcatactgtcgagcatattgaatgacctgctgaatggattatcttataataataaatcatatatctaattaagaattgaggttttaatcttgagtactaaaaacaaacacatcccttgtttaatcacaatctttggtgcaactggtgacttaagccatcgtaagttgtttccatcaatattccatctctaccaacaagacaatttagatgaacatattgccatcatcggtattggacgtcgtgacattactaatgatgatttccgtaatcaagtaaaatcatcaattcaaaagcacgtaaaagatacaaacaaaattgacgcgtttatggaacatgtcttctatcatagacatgatgttagtaatgaagaaagctatcaagaattactagattttagtaatgaattagatagccaatttgaactaaaaggtaatcgactattctatttagcaatggcaccacaattctttggcgttatttctgattatctaaaatcttctggtcttactgatacaaaaggatttaaacgccttgttatcgaaaaaccattcggtagtgatttaaaatcagccgaagcattaaacaatcaaattcgtaaatcatttaaagaagaagaaatttatcgtattgaccactatttaggaaaagacatggttcaaaatatcgaggtattacgtttcgcgaatgcaatgtttgaaccattatggaataacaaatatatttcaaacatccaagttacatcttctgaaatactaggcgttgaagatcgtggtggttattatgaatcaagtggtgcgctaaaagatatggtgcaaaaccacatgttacaaatggttgcattattagctatggaagcacctattagtttaaatagtgaagatatccgtgctgagaaagtaaaagtacttaaatcactgcgtcatttccaatctgaagatgttaaaaagaactttgttcgtggtcaatatggcgaaggctatatcgatggtaaacaagttaaagcataccgtgatgaagatcgcgttgcagatgactctaacacacctacctttgtttcaggtaaattaacaattgataactttagatgggctggcgtaccattctatattcgtactggtaaacgtatgaaatctaaaacaattcaagttgtcgttgaatttaaagaagtaccaatgaacttatactatgaaactgataaactgttagattcaaacctattagtaatcaatattcaacctaatgaaggtgtatctttacatctaaatgctaagaaaaatacacaaggtatcgaaactgaacctgttcaattgtcttattcaatgagtgctcaagataaaatgaatactgtagatgcatatgaaaatctattattcgattgtcttaaaggtgatgccactaactttacgcactgggaagaattaaaatcaacatggaaatttgttgatgcaattcaagatgaatggaatatggttgatccagaattccctaactatgaatcaggtactaatggtccattagaaagtgatttactacttgctcgtgatggtaaccattggtgggacgatattcaataattgaattaaaacgcacatgttaaacaaaaataaatgagcgaatgacaaggattgattacgaatcaagtaaatcaattgttctatcattcgctttttttctagactatattatgaaattatattttacaatgcccaaaactattttaataatcattgaacaaatgggtgtataatttatagaaataatgtagaataaaaataaatgattgaattaattggagtgaaagttttggacgttatcaagcaaatacaacaggcaattgtttatattgaagatcgtttattagagcctttcaatttgcaagaattaagtgattacgttggtctttcgccataccatcttgatcaatcatttaaaatgattgtcggcttatctccagaagcttatgcacgcgcgcgtaaaatgacactcgctgcaaatgatgtgataaatggtgctacacgacttgtagatatcgctaaaaaatatcactatgcaaattcaaatgattttgcaaatgattttagtgattttcacggcgtatcacctattcaagcttctactaaaaaagatgaattacaaattcaagagcgattatatatcaaattatcaactactgagagagcaccctatccatacagattagaagagacagatgatatttcattggttggatatgcacgatttatagacactaagtatttgtcacatccttttaatgttccggattttttagaagacttgctcattgatggtaaaattaaagagttacgacgatataatgacgttagtccatttgaactatttgttattagttgtcctcttgaaaatggtttagaaatatttgtaggtgtaccaagtgaacgttatcctgcacacttagaaagtcgatttttacctggcaaacattgtgcgaaattcaatttacaaggtgaaattgattatgcaactaatgaagcttggtactatattgaatcaagtttgcagttaacattgccatatgaacgaaatgatttatatgttgaagtgtaccctctcgatatttcatttaatgacccattcactaaaattcagctttggattcctgttaaacagagtccttatgacgaagattaaataattaaaaacaaagaagccccctaatatatctataggtctacaaatggccttagattctattagggggcatattaatatgttaatttagttcaataacacatgcttcatatggacgtaactgttttaaattaactttgacatcataattaaatagcttcacttctccatgacttaaatcaaatggtacagttaattctgcttcgtggttagtaagattacctacaataagaacttgcttttcatttaatgttctcgtgtatgcaaaaacttgtgaattttcagcatctactaaatcaaattgaccatatacgtatacatcattagactttcttaattgaattaaatctttataaaattgtaatactgaatgctcatcttctaattgttgtgcaacattgatagttttataattcggattcactgggaaccacggttcaccatttgtaaatcctccatttaacgtatcatcccattgcattggtgtgcgagaattatctcggttctcatctttatatttcgcaagtaaagcgtctacatctccaccttgagctttcacaatttgatagtcatttttaacagcaacatcgttaaatgtttcaatactttcaaatggataattcgtcataccaatttcttgaccttgataaatgaatggcgtaccttgttgcaagaaataaactgctgcatgacttgttgctgattcataccaatacttgtcatcgtcaccccacgtcgatacacgtcgtggttggtcgtgattttcaataaataacgcattccaacctttattttcaagttgtttttgccatctatttaatacagatttatacgaatttacatcaaagtgagaatcaccactattccacagtcccaaatgttcaaattggaatatcatattaaatttaccattttcttccccgacccagtcatcagcatcatcagggcttacaccattcgcttcaccaacagtcataatgtcatacttacttaatgagcgatctttcatttcttgtaaccaagtttgtatacctggctgattcatatctacatcaaatgctggggcatatgttttaccctcaggtacaggtaagtcacccgcttcaaacgtcttcttaatatgcgtaattgcatctactctaaatccatcaatgcctttatcaaaccaccagttcatcatttcaaatacagcatctctaacttccggattaccccaattcaaatcaggttgttttttactgaatagatggaaataatattgctcagtattagcatcatattcccatgtagatccattaaagatactttcccagttgttaggttcagagccatctggctttggatcttgccaaatgtaccaatcacgtttaggattgtctttactagatttggattctataaaccaaggatgttcatcagatgtatgatttacaactaaatctaaaataagcttcatacctctatcatgaacaccttttaataaacgatcaaagtcttccatcgttccaaattcatccataatctcttggtagtcactaatatcataaccattatcatcattaggtgatttaaacattggactgagccaaatgacatcgatacctaaatcttttaagtagtccaatttatcaatcattccaggtaaatccccaataccatcgtgattactatcattaaaacttcttggatatacttgatatgctactgcttctttccaccattgcttattcattttaaaactcctttgctatcgttgtgttgattttcttatttttaattctgtatctataatgacgagttcaataacatcctgtgctttgtttttcaatatatttaaaattgctgcaccagcctgttgacctaacattcgaggcttgatgtcaatactggtttgaggtggtgacgcaatttcggttaaataagaatcattgaacgttgctgtcattacatctttcggaatttcaatattaagttcatataggacacttaaaatcgctaaatgtaacatagcatctaacgaaatgattgcctgtttaatatttgggtccttcaaacgcgtatgcagattttgcatgtaattaaaaataacttctctttcattactagtctcaataatttgataatccagattaaattgtgatgcaactgtttcaaatccttgaatcctgtctttcgaaacttcaaaatcgcctttttctgtaataaatattaattcatctacaccttgttcaataacatgtcgtgtcaaattttcagaagctaatatattatcattatcaatgtgtgtaaattgatgatctatatccgatgtaggcttaccaatcacaataaatggcatgctttcatcaattaacatttgtttaatcggatcattttcttttgaatagagcagtataaacgcatcaaccattcgttgtttaatcattttataaacttcatccattaaatcattcatattatttgagactgtcgtctgtgtaccatagccatgctggttacacgtttcagaaattcctagcaatacattgatgtagaatggattcagtcgaataggctcctcagacccttttaacactaaaccaattttatatgtttggttagtaattaaagttctagcagcggtattagggaaataattcaattcttccataactttcttcacttttgaaattgtcgcttcgctaatacgttgatttccttttataactcttgaaactgtcgaaggagaaacaccggcttttagtgcaacatctttaatcgtaaccatttaatcacctcctgttaatctctgtattggaaaacgcttccaaccactgtataatatcagtttagtcacactttctaaaaaagtcaaaagatttgtgcaaacgattgcataaaacgataaaaataaaaccttcatactgaaattcaatccgaaaatcaatataaaggtttgtataaatattaaaatcgattgtttagtcactaactgcaaaatagttaccttggccatcttggaaattaaatacacgttgaccattcatttctactatatcatgcccagttaaacctaaatcatttaattttgagtataatgcatcaaagtttttctctttaaacattaaagatggtgttcctaggttcacctccgggctatacttttcaataaattcttttgccataatcgtcaatgacgtttcagcatctttcgtaggtgatacttcaactgcaacatagtcctcagctaacggtgtttcacttacaacaacaaattctaaagtttctgtccaaaatgctttcgctttttcaacatcatcaacatataacataacttgatttaacttttccataaaatagtacctctatttctctatagtacatgctatcataacacagtaaatattttattacttcacaaaatgcttaaaaatatggcgggatgtttttaaggtcaaagatattgcttgtgtaattttttataggttgtagctactctatcacactctcttttatatttatcaaaagatataaaaaaggatagtatctttcaactatcctttaatcaatattattcttcaatccattgtgtatggaatacgccttctttatcttttctttcgtacgtgtgagcaccgaagtagtcacgttgtgcttgaattaagtttgcaggtaaatcagctgcacggtaactatcatagtaattaatacttgaagagaaaccaggtgttggtacaccattttgaacaccagttgcgacaacatcacgtaacgcatcttgatattcagtaacgatgtttttaaagtaaggatctagcaataagttttgtaatcctggattattatcgtaagcatctttgatcttttgtaagaattgtgcacggataatgcaaccttctctccaaatcatagctaaatcaccaagttttaaattccattcattatcttcacttgctttacgcatttgcgcgaaaccttgtgcataagaacaaattttactcatatataatgctttacgaattttttctaaaaagtctttcttgtcaccatcaaatgatgcttttggaccatttaattctttagaagcatttacgcgctcttctttgattgaagagataaaacgtgcaaatacagattcagtaatgattgttaatggaatacctaattctaatgcgttaattgaagtccattttcctgtacctttttgacctgcagtatcaagaattttttcaactaatgcttctttattttcatctaatttcatgaaaatatcaccagtgatttcaattaaataactttctaattcaccagcattccagtctttgaacgtttgagcaatgtcttcatgagacatgcctaataattctttcatcatagcataactttctgcaattaattgcatgtcagcatattcgataccattgtgtaccattttcacatagtgtccagcaccattaggtccaatataagtaacacatgaagcaccgtcttttgcctttgcagcaattgcatcaagaatatctgcaactttgttataagcttcttcttgtccacccggcattaatgacggaccagttaacgctccaatttcaccaccagaaacgcccataccaataaagttgattgcactttgtgctaatgctttattacgtctgatagtatcttgatagtttgtattaccaccatcaattaaaatatctccatcatctaataaaggtaacaaactatcaatcgttgcatccgtagctttacctgcttgaaccattaataaaattttacgtggtttttctaaagaattaacaaattcttccaatgagtacgttggatgaatattttttccttttgattcttcaaccattaaatcagttttttcacttgagcggttaaatacagatacactatatccgcgtgattcaatattccaagctaggtttttacccataacggctaaaccaataactccaatttgttgtgtcatattacttacctcacttgttgatttttcattagtattgtatcacaaaatagacatacactacactaaatcatttcgattgtcgcgcaactattttgattatttctaacacttgacttgcaagcaagttcaatgatttaatcggcattctctcatttgttgtatggattttttcataacccactcctaaaatgactgaaggaataccaaatgtattaataatactgccgtctgaaccgccaccagaaataattgtatttgcagataatcctaaattactagcactttcttgtgcaattttaacaaccgtttcattatcattaattttaaatcctggataactttgctccactgtaactactgctttcccacctaattctgatgcagtagtttcaaacacatcagtcatatgtttgacttgtgtttttattctttctggatcgtgagaacgtgcctctgcttctaagatgacttcatctgcaacaatattcgtagctgaaccaccatgaaacttaccaatattggcagtagttatttcatcaacttgtcctaatttcattcgactaattgctttcgccgcgatattaatagcactaacaccctcttttggcgtacttgcatgagccgttttgccaataattttagctgaaattaacatttgcgtcggtgcacctacaaccgtagtaccgacatcagcacttgcatcaatagcataaccaaagtccgcgtccaacaactctgaatttaattctttagcaccaattaaacctgattcttctccaacagtaatcacaaattgaatttgtccatgtgggatttgttgttcctttatcacttgcaaaacttcaagcatagctgctaatcctgctttatcatctgcacctagaatagtcgtaccgtcagagtatatgtagccgtcatcttttacaattggctttacattaattgcgggtacaacagtatccatatggctcgtcaaatataatttaggtacttcgccttcttcgatagtacttttcattgtacacactagattattggcacctaatttaggatgtttagccgcttcatcttctttaacatctaaccctaatgctatgaatttttcttttaaaataggttggattgttgattcattccctgtctcagaatcgatttgtacaagttctaaaaacgtattaagtaatctttgctcattaatcataatggaaccccttttatccaaattttcaagtacgccaaacggtaaaaattgataaaataaaatgttacagtaattgacgttacacagatttatcaggcttgtaaattgtgtcatattattttcaatttaatatatatatttattgtaactcaaactaagctttgtcaaaaatatattgattgatttttcaaagatatcgtataatgaggaaaatgacataagcaaacttactcatgttttttataatattcctttatgatgattgctagttatatcgtctcaagttaaaagttttatatcttatgtcgtaattattaatacaaaggttattcatttggaggcacacaaaatgcaaaataaagttttaagaattatcattatcgttatgcttgtatcagttgtattagcattgttattaacgagtatcattccaattttataaactatatctcaactacctatacaaaatcatacaattaaaaatccatccgttataaacgcatgtattaataagttatcgtattgcaacgattactttcaaacatgggtcatacggatggattattttttaagctacttcgctatgcattttcaatgaaccaaattgcgatttgatttgtaaatattcttctaattcatttaatatttgaataatacttgctctcgagttaagcgctttgtgtgttgttggcaatggcagttcaaccaatttcaaacgcgtctcatacaaattgtgtaaacgcattgctgtatagtcattactattcacatttagaccaatttctttcagcagtgacgcaacatcatttaaaagtggatctttatgacagatactttcgatgagcggtttcattctcattaacaattccacttgctcttctcgcatatcaaaataatgatagtatgaattttcgtttctaacaaaatgatttttaacatctcggaacgcgatagacttcgcctttttaatatttaaaagtaacgcttcaaattcaatcgcaatggtatcttcatatttttcacaaatataactatatttactaaaaatatcagcaatttgttgctcaattttacatttgtattcgtctagttgtttgtctaaacttggcatcattaaattcattgtaaatgcaatacttagtccaattaacagtaataatgtttcattaacaattaaatgtacatcaattgattttgcattaaaaacatgaagtaatataacgcaactcgtaatgacaccttcttgtacttttaatacgacagttaatggtataaataacaatacgataataccgagtacaattggactctgacctaataaactaaatattgctgaacctaaaaacaatactaaaaaacatgatactaatcttgaaataatcgcttgtagcgaatgtacttttgtatgtttaatacataatacgactaatatggcgcttgaagcataattatctaaacctaacagcttactaataattacacctaaagtcatacccactgctgtttttattgttctaaatccaatcttgtaaggatttaactttaacatgggttagcgcctcttatctttcttcacaatatttattgaataatgtttgtaattgattaattacgttcatcacatcatgaccttcgatttgatgtctttcaatcatttctgtaatctttccatcttttactaatgcaaatgacggacttgaaggcgcataaccttcgaagtactcacgcgctctttgtgtcgcttctttatcttgtccagcaaatactgtcactagacgatcaggtaatacgtcataatgtaaagcatgtgatgctgctggtcttgcgataccacctgcacaaccacatacagaattgatcataactagtgttgtaccatcttgtttaagaactttgtcaacatcttctgcagtagttaattgctcatatcccgcagattcaatttcattccttgcttgttctacaacaccgttcatgtataaatcgaaattcatgtccataagttcaatcacctatccctttatatttaaactatcctcattctactaattaataacatattgttcaataaactaatctgaatcacacctatatttagacacaattttaacaatataccaaacattattgtgcttaaaatcatggaaactaatttgttcacctgttttcattaatatgtttcaagtatgatgtcttattttgactttactgcaaaaatgcattcaaccatgttgattattgttctttaccttttttgaatatattgcaaatattttattgcccaaaaaaatacatccatcgacaagaacaagataaaacaagttgtcgatagatgcatctttgttatcactaatatatatttgtattttctaaagtatactgttcgatacgctgtttaatatgattcataaatttacctgtttgtaaaccatctaaaatacgatgatcaattgaaatacataaattaaccatgttacgaattgcaatcatatcattaattactactggctttttaacgattgattctacttgtaaaatcgccgcttgaggatgatttataatacccattgatgatactgaaccaaatgtaccagtattatttaccgtaaatgttccaccttgcatatcttcagttgtcaattgcttattacgcgcttttgttgctaaagtattaatttctctagctatacctttgattgacttttcgtctgcatgcttaatcacaggtacgtataatttattttcatcagcaacagcaattgaaatattaatgtctttatgtaagacaatttcatttccttgccagctactatttaataaaggatatgcttttaaagcatctgctacagcttttacaaagaaagcaaagaaagttaaattatatccttctttatttttaaatttgtttttataatggtttctcgtattcacaaggtttgtagcatcaacctcaatcatcatccatgcatgtggaatctccgttacactattaaccatgttttgtgcaattgctttacgcacaccatttactggtattgtgctattttcactattgccttcagatgattggttacttgatgtatctactgaagttgattgtgtttgaacttgtttgtcagattgagctgtggtaccaccattttcaataactgacattaaatccttcttagttacacgaccttcaaatccactacctacaacttgtgataaatcaatgtcatgctctgaagcgagtttaaatacaacaggtgaaaagcgaccattatttcgtggttgattttgtttagaagtagatgtctgttccactgttgaactagcttttttagtagatttctgagtatgctcatccacttttgcttgtatctcttcagttgtttcatttgtcttttcatcagcagtttcaattttacagataattgtatcaatagctaccgtctgccccgcttcaactaaaatttctgtaattgttcctgatatcgtggaagggacttcagctgtcactttatctgtaataacttcacataatggttcatattcatcaatatgatcaccaacagaaactaaccattgttcaatggtaccttcatgaacactctcacctaacttaggcattgttatttccatgactttccctccctagaattctgctaattcacgcattttatttaagattttttctggattcatcataatttcattttctaatacaggtgaaaatggcatagatggtacatctggagcagccaaacgcatgattggtgcatctaaatcgaacaagcaatgctctgcaataatcgctgacacttctgacataatactaccttctaaattatcttcagttacaagtaaaactttacctgtatgtttagcacgatcaataattgtttctttatctaatggataaacagttcgtaaatcaacgacttcaacattgataccgtctgcagctaaaatatcagcagcttgtaagcaataattgaccattaatccataacaaaatactgttaaatcttcaccttcacgtttaacatctgcttttcctaaaggtacagtgtaatattcttctggcacttcttcctttaagaaacgataagcttttttatgctcaaagtacaatactgggtcatttgattcgatagatgataataaaagccctttagcatcatacggtgtggaaggaataacaattgttaaacctggtgatgaagcaaatatactttcaatactttgtgaatgatatagtcctccgtgaacaccgccaccaaatggtgcacgaatcgttaatgggcattgccaatcattatttgaacgataacgcattttcgcagcttcactaataatttgatttgtcgcaggtaaaataaaatctgcaaattgaatttctgcaattggtcttttacctaccatagctgcaccaatggcagttccaacaatatttgactcagctaatggcgtatcgataactctgtcttcaccatatttttgttgcagtccttgagtagtaccaaatacgccaccttttttaccaacatcttcaccaagaataaatacatctttattttgttgtaatgctaagtcttgtgcctggcgaatcgcctctaaataagataatttagccattagttaagactcccttcttcgtacacaaatgcataggcttcttcgacacttggatatggcgcgtcttcagcagcctttgtcgctttattgatgatgtctttatgctccgcttctatttctgccaaccaagcatcatcgataatgccagctgaaagcaactcttttttgaatttttcattgcagtctgcttttttaagcgcttcacgctcttctttcgtacgatattgatcgtcgtcatccgatgaatgagctgtcatacgagaagttactgcttcaatcaatgttgaaccctgtccagaaatagctcgttctcttgcttctttcatcgctttatacattgctaaaggatcattaccatctacttgttcaccatgtataccgtaaccaagtgctctatccgataatttttcagctgcgtattgtaatgaatcaggtactgaaattgcatatttattatttataatgacacatacaaaaggaagtttgtgtacacccgcgaagtttaaaccttcatggaagtcaccttggtttgagctaccttcaccaacagttgctgttgcaattttcttcttaccatccatttttaaagctaaagcagcaccaacagcatggggtatttgagttgctaccggtgaactttgtgacaaaatattcttagatctactactaaagtgtgatggcatttgttttccaccagagttaacatcgtctttctttccaaacgctgataaaaacgtatcatacgctgagatacccatataagtaacgaaagctagatctctataataaggcgcagtaatatcaccttcttctaatgcgtatgccatcccaatctgagttgcttcttgtccttgaccacttacaacaaatggaattttacctgcacggttcaataaccacagtctttcatctatttttctacctaaatccatccatttatatattacttttaggtcttcttcgctaaggcctaatgatttataatcaatcatgttaaatcctcctatttatacgtgaatagctctactttctgctttcaatcctaattccatcaacacttcagagatggaaggatgtgcgtgtgttgttagtcctaattctaatgccgagccattcatgaactgtaacagtgatgcctcattaatcaattctgttacatgtggaccaatcatattaatacccacaatttcttcagttgattgatcaatcaccatttcgctatacccttcgtttgcgtcatggctatcaatcactgctttaccaattgctttaaatggtactttaaaacttttaactttcattccctctgcctttgcttgttcaatgtttaaaccaatagaagcaatttcaggttgtgaataaatacacttaggcatcatgttatagtttactgggattgggttcccttcaaacatatgatcgacagccacaacaccttcttttgatccaacatgtgccaattgtaattttccaatacaatcaccagctgcataaatatgtttatcttcagtttgttgaaattcgttcgttaaaatatgtcctgatgttgaaagttttattttagtgttgtttaaaccaatatctgatgtgttaggttttctaccaatcgatagcaacactttatctactttaattatgtctgaggaaatttcaaatgtaacaccatcttcgttaacattgatatcattttcagaaagttttattccctcatagaatttaacaccacgtgctgacaatgatttttttaatagttgtgaagcttgtttactttcagttggtaaaattctttcacctgcttctataactgttacgtcaacacctaaatctatcatcaatgatgcaaattccattccgataacaccaccaccaataataccaatacttgatggtaacgtctttaatgataatatatcatcgctagataaaattttatcatgatcaaatgataagaatggcaactctgcaggcgaagaaccagttgcaattaatacaaattggttgggtaataagtctgattcaccatcttcatattcgacagaaattgtgccactttgaggtgaaaatatagatgtacctagaatacgtcccgtgccattataaatgtcaatgtgattgtgttgcattaaatgctttacaccttgatacatttgattaataatgtcttcttttcgtgccaacatattttcaaaattaacattaacatctttgacatcaacgccaaacattgctgcctgttttactgtttgcaatacttcagcagatttaagcagcgatttagtaggaatacaacctttatggagacaagtacctcctaatagttgtcgttctactattgccacttttttacctaattgagacgcacgtatcgcagcaacatatcctgcagtacctccaccgagaacgactaaatcatattgtttctctgacatgttcttactcctaactaatgatatatatccattgaaaaatttattaatacatagttttcatgtccattaattacctattttacatgattgtctatttagtttgaatgcacataaataaatccataaatgagtagtcaacacacttttggaaattatctacgtctttgattgtgttgtatcatttctcttgcattttcacgagttaaatcagtaacacttgcacctgaaatcattcgtgcaatttcatctactttatcatcgccaattaactcttgaacttgtgttgttgtacgatcatcttttgatgatttcgaaattaataaatgatggtcgctcatcgatgcaacttgtggcaagtgagatatacaaataacttgtatatattctgctatatctcgcattttctctgccattttttgtgcggcttgtccagatacacctgagtcaacctcatcgaataaaattgcagtttgacctctcgatttaacaaaaatactttttaacgctaacataattctagaaagttctccacctgacgcaattttatttaaactttttaatggttctcctttattaggactgattaaaaattctacaaattcgattccatcaatattcggttcttctaattttttaaatgaaatctcaagatttgcatctttcatttgtaagttttgaatttcagatacaatgtggtctcttaactccctagcaactatacgacgctgctttgataacgcttgtccaacctctataacttgattatacaatgcatttatttcttctcgtaactgcgatgtactttgttcatagttttcaattttattgatttcattattaagcttttcttgatatgcgattaattctgaaatatcttttccatatttgcgttttaaattattcagcaaattcatacgagattcatactcatttaacacttgttcgtcgaattctgtattagccatttcatcatataactcatgttttgcatcttctaaaatgtaataaaattgatcaatatcttcttttaatttgtcatatttgtttggaactatatcgtttattgttaacaaatggttgcttagttcatacaaacgatcagtgatagcattttcatccgttaatgtcatatgtgcgttattaagcgctaagcttaatttttcagagttttgaatgcgtttaatatctatttcaagttgctctatttcgccttcttttagatgtgcttcagacaattcttctaattgaaatttcattaaatctaaacgctgcagcaatgcttggtctgctgattctaaatcttctaactcttgctttttggctttataattttgaaaagtttggtgatatttatccaacaaatcttgataacgtgattctgcgtaattatccaataatgttaaatggtatttttgtttcaacaaagattgcgtttcatgttggccatgaatatctaataattcttgcataacttttcgtaaatcttgtaaagtaactgtttgattattaattttacaaagacttttaccagagctaaaaatttcccgtttaactaataaaaaatcttcatctacatcaatatccatatttttcaatatatgtatagcatctttactctcgtcaatatcaaatataccttcgatgacagcctttttttcaccatgtcttacaaaatcagatgaagctctcattccaattaattgtccaattgcatctataataattgacttacctgaacccgtttcaccacttaaaacagttaaaccatcagaaaattgaatttctaactcttcaataatagcaaattgcttgattgataaggtttgtaacataaactcatcgcatccttataacaaattgaaaattcttgacttgatttcatcacttgcctctttgcttcgacaaataattaaacaagtatcatcaccacaaattgtgcctagtacttcttcccaattgatttggtctaatatagctccaatagattgtgcattaccaggtaatgtttttagaacaagtaaattatcagtaccatctatattaacaaaggaatccattaaataacgtcccaatttttctaaaggatggaattttctatcatttggcaaactataaacatattgacctgaaggtataggtactttaataagttgtagttctttaatatcacgagaaacagttgcttgagtgacatttaaatcataatcgtttaatcgtttaactaattcatcttgtgtctctatctgttcatttgaaataatttctctaatttttatatgcctaaccgattttttgggcacagtaaacacctctgattacgaatatttatacatttattttaacacatgcactgatttacgactactaaacacctttacgtaaaaagggtaaacatggtttatctatcttgattatcaatttataaatatttttcatattacgcataacaattgcttaaaatatgtataaaaatgaatatatgtgtaataaacttgctaatcattagatttaataagcgtcaattgtttgaacatatttaattaaaatcagattgatatcacagatgcgaatattgtcgtatagaaattgaaaattctatttttatatgaaagtctttaacataattttaagtttcaacatgagaaaaatcgattaacaaacaacgtcagttgaatatgccttttgagacatttcaaacttaacaattgttgctaatcgatatatttgcttttagtgatccctgctataaaataaatcaacgatttctaataagtgttttgtattgaattgttcatcaatttgcattagttcatccactgctgcgtctctatgataagtcaatttatcttctgcgccatcttttcctaataaactcacgtatgtacttttattattttcaagatcgctgcccacttttttacctaacttcgcttcatcaccatagcagtctaataaatcatctttaatctgaaacatcatacctaaatgataactataactttctaaatgttctttagttgcatcatcgacattagcgatatctgctgcactcataaccgcaaaagttaatagtgctcctgtttttgttttgtgtatcatttccaaagtttcaagattaattggttggccttcgctttgcatatctaacatttgaccgccaaccattccaacatgaccacttgctattgacagccgttgtagaacttttatttttacttcatcagttaatctatcatcacttgaaataagttcaaatgctttagttaataaagcatcacctgctaatatcgccgtccactcaccatatactttatgatttgttaatttccctcgtcgataatcatcattatccatcgctggtaggtcatcatgaataagtgaatatgtatgaatcatttctagtgcaattgcgctcttcatacctaactcatgcttggtatttagtgaatctaaagtaagtaataacagaactggtcggatgcgtttacctccagcatttaatgaatacaacatactttcttctagctgagtatccattactgatttatttatcgcaaccgataattcattattgacttcatctattaatttattcatcggtagattcgtcattttttacatcctcagcttcttcttttattaagtcattcacctttttttcggcattttttaaagttgtgtcacaagctgctgatagtttcataccacgttggtataaatctaatgattcctctaaagatactgtttcattatctaatttttgaacaatttgctctaattcttgcatcatttcttcaaaactttgcgtttctttagtcattattacaccttactttcgtaacttttgcatctactaagccatctttcattgttaacgtcaattgatcattttctgttaaatctttagtactcgtaatgacttcgtcttttttattaacaattgcatatccacgcaacattgtattagttggacttaaattgtttaagttttctactttatttttcaaatcatttttataacttaatatcttagaattcaataatttaacaagttggtttgtcaattgaagattattttgttgttcttgattaacactacttagtaacgcttttaaattatagcgttgttgcaacagcattaatcgatgtctctgttgttcaaatgttgcctgaatttgttgtttcagtctcttttctaaatcatctcgacgttgtatctgttgatcatacaataaagttggttgtttaaacttgtaatacgatgacaaatgttcaacatgtttacgttgttgttctaaatgtttcttgatgaaacgagtcaatgtaaactgatattgctgtatttgttgcagcaattcatattggtctggtgttgcaataacagcagcttgagttggagtcgccgctctgatgtctgcagcaaaatcacttaatgtaacgtctgtttcatgacctactgctgatataatcggtgtcttacaattatatattgcacggacgacagcttcttcgttgaaattccataaatcttctatggatccaccacctcgacctacaataatggtatctacacctaaactatctgcatattcaattttttcaataatgtcgtcttttgctttttcaccttgaaccaaagtactaatttgtatttgttcagctaatggaaagcgactatttatcgttgaatggatatctcgaattgcggcacctgtactcgctgttaaaactgcaatttttttaggaaacttaggtattgatttcttattcgcattatcaaaacaaccttcttcagttaattttttctttaatgcttctaatttttgatataagttccctataccatctaattgcattttatttacataaatttgatagtttccacgacgttcaaaaacagaaacacgtgcttctaataagacttcatctccttctttaggttcgaagtttaatttagaagcactacctttgaacatcatggcacttataacgctttctttatctttcacattaaagtataaatgaccacttgaatgctttttgaaatttgaaagctcacctttaatcaatacagattggagatgtggatcttgatcaaatttatatttaatatatttcgttaaagctgaaacacttaaataatctgacatataacatcactcaattttatttttttatattactcaatacaccatttataaatttataatgatcatcatcactgaattgttttgttaattcgactgcttcattcattacgactttagcaggtgtatcactgtgtaatatttcatatgttgccattcttaaaataatacgatccgtttttaataaacgtgcaatagtccaatcttttaaataaggactaattgtctcgtctaatacaggttcgtgatctttaacgccagaaactagccaatgaataaattcgaagtctaaatctggattatcgtctttaataaagcttatcgcttcatttatcgttaaatcactgtccttcatttctaattgaaataaagtttgaaaagcttgcactcgggattctttacgactcatttttaactccttcaaacgtttgtatttttctttatttaattactgaattaggtatgacattacttttcaataacgatttgtgtaatgtgaatattaatttgcttaggttctatcgctgtcatattagaaattgaattaaaaattgacgtttgaattttgtttgcagtttttgaaatattaacaccatgttttaatgcacaatatacatctatatatatgccatcttctttactctcgatttttaaatcacggcttaaatttttacgactaactttttctaaatttgtttcttttaattcagcaaaatggccagtgatgccttcgacttccgaagtagctatacttgcaataacagatagcacttctggcgctatttctactttacctaattttgaatttgaataatcagttactttgaccatggattgacctcctattaaccttcatcattcataatgctattttgctctaaaaagtttgtattaaatttaccgcttctaaatatttggttattcaataatttaatatggaatggaatagttgtatcaataccaagaaccacaaattcacttaatgcacgaatgccagccataatcgcttcatctcgtgtcggttcatgtatgattaatttcgctaccatcgaatcataatatggcggtatcgtataattagtataacatgccgactctattcgaacaccatatccacctggtgcaagatattgctcaattttacctggtgatggcataaagttcttgtaaggattttcagcattaattctaaattcaattgcgtgtcctgttaatttaatatcttcttgtttatacggtaacacgtcgcccatagcaacttgtaattgtaatttaactaaatcaattcctgttaccatttcagttacaggatgttctacttgaatacgtgtattcatttccataaaataaaatttattatcatttaaatcatatataaactcaattgttcccgcattttcataatttacagctttcgctgcacgcactgcggcatttcccatttcacgacgtgtttcatcatctaaaattggggaaggtgcttcttccactaatttctgcatacgtctttgaattgtacaatcacgttctcctaaatgaattacattaccatagctgtccccaacaatttggatttcaatatggcggaagttttcgatgaatttctccatataaagtccaccattaccaaatgcagtttgtgcttcttgttctgtcattcggaagccagtttcaagttctttttcatcacgagcaacacggataccttttccgccaccaccagcagtagctttaatgatgaccggataaccaatttttttagcgattttcttagcttctgagacgtctttcattaaaccgtcactaccaggaacaactggaacattggctttaatcatttctgccttagcaacatctttgatacccattttttggatagattgataacttggtccaatgaacttcaattggcatgcttcgcataattctgcaaagtcagcattttcagctaaaaagccataacccggatgaacgccatcacaacctgtagaagttgcaatagataagatgttcggaatatttaaatatgaatctttagacaaagtgggacctacgcaatatgcttcatcagcaatttgagtatgtagcgcatctttatccccttcagaatagattgcaacagtttggatgcctaaatcacgacaagcgcgaataatcctaactgcgatttcaccgcggtttgcaattaaaacctttttcattatttcaccttaaataacggttggccatactctaccatttgtccgtcttctactaagatctcaacaatttcacctgaaatttctgcttgaatttcattaaatagtttcattgcttctaaaatacacactgttgtttcatttgaaacagtgtccccaacttgcacataggcttcttcgtctggagatggcgatttgtaaaatgtacctaccataggtgcattaattgttttgtgattatctgaagttggctttggagcttcagttttattgttatcagttgattgtacttgaggcataggcattgccgcagcttcaactggcatttgtgagatttgtggcgtgataatctcagtttctttttctttcttaagcgtcactttgcctttagtatcttcaatattgatttccgttaaagttgatttatccagaatttcaattaattctttgatttctttaaagttcattattactgactccttcagtttgttttcatctacccgtctattttacttgagacaactcttcaattcaagcatgttcatatcgcaggcgacattataagtctatcccaaagttataataaaaccacattttaaattaaaaacacttgtggatttattacttaacattgactcatcttaactcttgttaaaaattttatgcattcagttaaacatatcaatgttatttttattagctattatttcttatcctcaacaatatgatatgtagatatatacccttactcatgtctatgtttttttactaccaattagacgattcgttttatattttaaaatttattttaaaaataaaaagcctcatatcagcatataacctataatcattttaggcaatagctttatgagacttatttggaatatcttacgttaaatcagtatagtgaatacaagctttttgttaacaaattagagattatcctcttgaaatgtagcttccatcaccagtgttgataattaaaacgtcaccttcgtttacaaataaaggtacatttaatgtataacctgtttcaacagttgccgatttagtagcaccagttgcagtatcacctttaataccaggttctgtttcagttactgttaattcaacagttttaggtaattcaacaccgatagtttcaccctcgtatgtttgaatttgtacttccataccttcttttaagtaattcaattcttcttttaagtaatcacttgaaagttctgtttgttcaaagctttcattatccataaatacatgattatctccgtcagcatataaatattgcatacgacgattttcaatcattgctggttcaactttttcaccagctctaaacgttttctcttgaattgcaccagttcttaaattacgtaattttgaacgaacgaatgctgaacctttaccaggctttacatgttggaagtctataactttccaaatagcgttatcaacagaaattgttaaacctgttttaaaatcattaaccgaaatcattcagtttcctcctcattttacacgcttatgttaaaactataaggtcttttgtgcatttagtaaagacttgacaaccattttctgtaattaaaatatcatcttctattcttataccgcccaaaccttctatataaacaccaggttctactgtaacacagttgttaacttgaagtttatcttgtatcgtacgagccagcattggcccttcatggatttctaaaccaataccatgtcctagtgaatgtccaaattcttttccatacccttttgactctaaatagtttcttgaaatggcatcagcttctgcaccagtcatgccaggtctaatctcattaattgctttcatttgtgattcaagtactatttgatatatttctttcagcttaggatctggttctccaatagcaaatgttctagtaatatctgaacaatagccgttataatacgcaccaaaatctaatgtaatcatgtcgcctttttcaataattttatcacttgcaacaccatgtggtaatgcacctctatgaccagatgctacaatcgtatcgaatgatggtccatctgctcctaattctagcattttactttctaatattgcctttaattctttttcagtcatacctgcttttacaacagttaaaatatattcatatgtttcatcaacaatattagctgctttttgaattaaagcaatttcgtcagcatctttgacgtctctaattttatctacagtattagaaatgcttattaatgatatacggcttttatttaattcaaggtatgtatcataacttacatggtgcccctcaaaacctacattttcaaaattttcttggtgtagcaattctttaatctcaccaataatagtagatttacgattaataatttcataatttggcgcctgcttagttgcttgatcaatatatctaaagtctgttatcaaatattgtttatctttagatatgataagtgctccactggtaccagtaaaacctgataaatatcttctattgtaatccgaaagaatgataatcgcatctaaatgtttttgttctaaaatacgatgcacttgtgttattctgctcatcttattacctcctagtgaaacgtttgtgcatttcaactttatacattaaaataatatcataataaggataaaaaataatagatattgattttagggagatagtaatgaaaaaattggtttcaattgttggcgcaacattattgttaactggatgtggatcacaaaatttagcaccattagaagaaaaaacaacagatttaagagaagataatcatcaactcaaactagatattcaagaacttaatcaacaaattagtgattctaaatctaaaattaaagggcttgaaaaggataaagaaaacagtaaaaaaactgcatctaataatacgaaaattaaattgatgaatgttacatcaacatactacgacaaagttgctaaagctttgaaatcctataacgatattgagaaagatgtaagtaaaaacaaaggcgataagaatgttcaatcgaaattaaatcaaatttctaatgatattcaaagtgctcacacttcatacaaagatgctatcgatggtttatcacttagtgatgatgataaaaaaacgtctaaaaatatcgataaattaaactctgatttgaatcatgcatttgatgatattaaaaatggctatcaaaataaagataaaaaacaacttacaaaaggacaacaagcgttgtcaaaattaaacttaaatgcaaaatcatgataggagtcttttaatgcgtaatataatattttatcttgtacttattattgctgcgattggattagtaatgaatctagatgcctttattttttcaatcgtcagaatgttagtcagctttgctgtaatagctggtattatttatctgatttattatttcttcatcttaactgaagaccaacgcaaatatcgcaaagcaatgcgtaagtataaaagaaatcaaagaagaaaatagataaaaaaatggaagcacttgtaggtaaaatagtctacgtgcttccattttttattctaaaaactactttctaaacatccattcatctgaacgatatttttcagttaattcttccacttctgccaattgagcttctgttaattcaagtggctttaattctatatttaaacctttcttaaaacctttctcgaaagcttcttccatttgactaatagtaatgtgttcatctgaaatatcattgatggcaactgctttttcaacgaatgcctctttcatttttaactttaatctttcatttttataaataaacatatcaaacaattcatcaatatcaatatcttgtaaaatcgaaccgtgttggaggattacacccttttgtctcgtttgagcactcccagcaatcttacggccttcaacaactagctcataccaacttggtgcatcaaaacacactgaacttcgaggttgttttaatttttgacgctcttcaggcgttttaggtaccgcaaaataagtatcaaatcctaagtttttaaatccttctaataatccttgtgaaatcactctgtacgcttctgtaacagtagaaggcatattgggatgcgattcaggcacaatcacactgtaagttagctctttatcatgaagtaccccacggccaccagtttgacgccttacgagaccaaaacctttctctttaaccttatcaatatcaatttctttttgtagcctttggaaataccctattgataatgttgcaggattccatgtgtaaaaacgtataactggatcaatttcacctctagagacaaaatttaataacgcttcatccattgccatattataatatgggtctttacttcctgtattaataaaattccaagtttcagtcatattcaagaactcctatcagcaaaatgtataatatttgattcgctaattaatcaatttaactaaatgaataataattgcaattctttagtgaaatattttgataatttgacctaacagtcttataattatattatcgtttaattagggaggatgcaagatgagtgctagtttgtacatcgcaataattttagttatagcaattattgcttatatgattgttcaacaaattcttaacaagcgagctgttaaagaattagatcaaaatgaattccataatgggattagaaaagctcaagtcatcgatgttagagagaaagttgactatgactacggtcacattaatgggtctcgcaatattcctatgacaatgttcaggcaacgattccaaggattaagaaaagaccaaccggtatacttatgtgatgccaatgggattgctagctatagagccgctcgtattttgaaaaagaatggatatacagatatctatatgttaaaaggcggctataaaaaatggactggaaaaataaagtctaaaaaatagttttgtaaatttaatatacgatttaataaaatctgagtgttaattgatcatcaataacaatactcagattttaattttttaacaaagtctgttactatatttctctagcttctcagatcattaaacttagtttcagcataataaagaaacttcaactcattttcaatacgattcaattaccgcaatctaaaaagtgaaaagacaatttctatgaaagaataataccaaaccctaagagttattacttcggtttagttttcttgttcaaatagaaattgtcttttttaattgattttgaaaccattatccttaaatcttcatacaaagttagaataataattccaggaatatgtgtttaataccttatttttcctgtttaagattttcaaattttaatattggtttacgagcagctgtagcttcgtctaatcgatcaatcacagttgtatgtggtgcttctagcactttatcaggatcgtttttagcttcttcagcaatactaattaatgtatcgataaaataatcaagcgtttctttagactctgtctcagttggttcaatcatcataccttcttcaacatttaatgggaagtaaattgttggtggatgtacaccgaaatctaatagtcgcttagccatgtctaaagtacgtacaccaaattctttttgacgcacaccacttaacacaaactcatgtttacaatattgtttataaggtatttcaaagtattcagataaacgtgctttaatataattcgcattaagaaccgctgcttcagaaacctctttaagtccagttgctcccatagttcgaatatacgtataagctcttaagtaaataccaaagttaccataaaatggttttacacgtccgatagaatttttaatatcattatcatatttaaatttgtcgccatctttaataaccattggctttggtaagtaacttgctagttcttttactacaccgactggacctgaaccaggaccgccgccaccatgtggaccagtaaaggttttatgcaagtttaaatgaacagcatcaaatcccatatctcctgggcgaactttgtccataatagcgtttaaattcgcaccatcataatataatagaccaccagcattatggacgatttcacggatttccataatgtttttttcgaaaatacctaaagtgtttggattagttaacataatagctgctgtattttcatttacaacacgtttcaagtcatcaatatcaacttcgccacgttcgtttgattttacagtaactgatttaaatcctgcaaatgaagctgaagctggattcgtaccatgcgcagaatctggcacaatgacttcatcacgatgaccttcaccattattctcatgataagctttaaatatcatcaatgcagtccattcaccatgtgcaccagcagcaggttgtaatgttacctcatccataccagtaatttcttttaattcttcttgcaaactataaataatttctaatgaaccttgaacttggtcttcatcttgtaatggatgtgattcactgaatcctggtattctagcaaccttttcattaattttagggttatatttcatcgtacatgaacccaatggataaaatccgttatctacaccgaaatttttatttgaaagttcagtataatgacgtactaagtctagttcagcaacttcaggaaactctgctttgtttttacgaataaatttatcatctaacaatgactcaacagaatttgttttaatatcacttattggtaatgaatatgcatatctgccttcacgagatctttcaaaaattaatggacttgatttactagtcatttaactcaccagccttttctacaaatgtatcgatttcatcctttgttcttaattcagttacagctattaacatgtgatttttaaagtcgtctgaaacaacacctaaatcaaaaccaccgataatattgtacttcactaattcctcgttaacttgttgaattggtttgtcaaatttgactacaaactcattgaaagatgtaccatctaatacttcaaaaccttttttaataaattgttgtttagcatagttagcatgttctatattttgaactgcaatatcatagataccttgtttaccaagtgctgacattgcaattgatgacgctagggcatttaatgcttggttagaacaaatattagatgtcgctttatcgcgtcgaatatgttgttcacgtgcttgtagtgttaatacaaagccacgattaccttcatcatcttgtgtttgaccgactaatctacctggcactttacgcattaactttttcgtcgtagcaaaatatccacaatgcggcccaccgaattgagcaggaattccgaatggctgagtatcacctacaacaatatctgcaccaaatgaacctggaggtgtaagtaatcccaatgctaatggatttgcatatacgataaataatgcttttttatcttcaataaagctatgaatcttttcaagatcttcaattgaaccgtagaagtttggatattgtactgcaacagctgctgtttcatcatccactgctgcttctaattttttcaaatctgtaacagtgccatctaaatcgatttccactacttcgaattccttacgcgtcttagcataagtatgaagtacttgtaatgcttgataatgcaaaccttttgagactacaattttatttttctttgtttgactaaatgctaaaatacatgcttcagcaaagctagtcatcccatcatacatagaagaatttgctacatccatatctgttaattcacaaattaaagtttggaactcaaaaatggcttgtaattcaccttgagaaatttccggttgatatggcgtatacgctgtgtaaaattctgatcttgaaatcatagcatccacaactgatggcgcgtaatgatcataaacaccagcacccaaaaatgatgtatgcgtttctttagtgatattcttgcttgcaatgcgatttaatcttctaagtaacgttgtttccgcttcgctttcagcaatatttaaatctctatttaataaaatgtcacttggtacatcaccgaataattctcctatagattttgcaccaattgtttgtaacatttcttgcttgtctttttcagttaaaggtatataacgatgactcacaatgcacacccctttttaattatttatcaatttgatttttcttaacaattttcgcttttaattgacgcttacgaacttgaacaagcaactctctacccatttcaaactcatctctttttatcattgcaagtgcaattgattttcctgatgatggagactgtgttcctgaagttacttctccaataatatttccatctaaatccataacttcataaccagttcttgcaattcctttttcaagtaattctaatcccactgttcttcttggtgcaccattttctttttgatcttttaatacagatttaccaataaaatcagcatcaattaatggtttacttgcaaaagcgataccaccttcatatggtgtaattgattcagttaaatcttgtccatgtaatggcaatccagcctctaatcttaatgtatcacgagcgcctaacccacatggcataacattatactctaataaaccatcccaaattttttcagtatcatcgatattacaataaatttcaaacccatcttcacctgtgtaacctgactgagataaaatgacatttgctccaaataatttgacaccctgtttaaattcaaacattttcatttcagttacatcttcatcaactaattgattaattaaatctctagcttttggtccttgtattgctaattgaccatattggtttgatacattttgtacttcaacatcaaatttctctttgtgttttaaaatccaattaaaatctttttcagtattagcagcattaacgactaataaataattgtcgtcagctaatttatatattactaaatcatcaataataccgccttcttcattacataaagcagtatataatgcttttgaagtagttaaattatcagtatcatttgataataaatattgcacaaactgactagcatctttacctgttacttcaatttcacccatatgactaacatcaaacaggccaatttcgtatcgaacagcattatgctcctctttaatacttgaaaattgaacaggcatcgcccatcctccgaattccacaatttttgcacctctatcaacataattttgatataaaggtgtttgttttaaatcacttgacattgaaatacccccttaaaattataaaaacaggatagcaatcgctaccctgtttataaatcaccaattcaggaacgcgttacagtattatccttttgcctgagagtttcgtaataaattacttgcaccttcggcgatagagtcttaacgctctattctctctaatactgatcactcgcttttattaaatttagcaattcataatatatttctgaaattgatagcaaatgactatcaaatttcttgaatgcgatttcattatatcttaaaatccgcgagcaatacaagtcatttaactgcttgattgtcttattatttgcattaggtcgatgtgggtcatcattgattcgactatatataatatcaatattacaatctaaccaaataatgtttttttgatttttcaaaaaattaaatgcctcttcactttcaataatcccaccaccagtagcaattatatctgcagtgttaatacattcttgcaaacatgtgaactctaaattcctgaaatattgttcaccatgtttactaaatatttctggtattgttaacttatacttttcttcgatatatgaatctatatcaataaatgataaattttgctcatctgcaacgtatttaccaatcgtagatttaccggtacccatgaaaccaattaaaattattggtgatttatcatgattcatgcgttttcccttctttcaataacaaaacaatcttatagttatagtcagtttcaatattatataatgtctttaattttaaactatattgactgatataaaaagtgaaaatggaaaaataaattgctgttagcatcaataagaacggagtaacatatcctttttctttatataaatcaaaattaataaattatttcacatcctttttaatagtactcatttaaattctagtaagttatacataaatagttttagtctgcagatttgtaccgactttaactgttatcgttattttaataatagatttatagtagatatttgcagtaaatgctgtaacattattaatcaatgttatatttcctctgtcatttacaactttaataattttattatttattaatttgtattcgatcatttcttcacctttatgtaaaatgatacgctgttgcctaatttcaatatcgtttctatctacacctttaaaatcctctagaatatctcttgagaaaaattcgaaatctacagttgttaattccctactttcaattagaaaagttttgctaagtctaattaagtctggaacaattagtaaagttatgcttataaccatcatcgctactaacatttcaataagcgaaaaagctttgacattaatactgtatacatgtcttttgataagaagtggtattttttgaaatagcacaaatttgttggtcactttgcttaatatcatatttccctatagttacccccttcttaagttcttctttattaattttagatacagtcgtcaaaattactttagaagcatcaattgtttgtagtttatggtttatactcgcttgcatttgattcatcattggtatcaatagtaatgtaatcaatccaataagcaaaaatccagccatactatctattaagaatgatcctttacacttatagcttttcataacgaattcttcctttttcaatatggaatattattctataaattgaattgttattgtcaattgttatgctaccaaatttattgatattcccttttttatcaaaggcaataatatcaacttttgcaacattaattattttgcctacttttaattttagaaatcgtattttattattctctattactttaattgtgtcactgttttcataaaatctaacattgatatatccttgatttgctatagcttgcgacttaatataattcaattcagtaataagagaaatgatatttgcctcatcatctattactctaagattgcttaatcctttagatgtcattgtcaaaagtaaaaatatactgattaacatcattaccacaagcatttcaatcatagtaaatgctgactgctttctaatttgcaactgcttctccattactaattgttattgtctctcctgatttacatgtcttttgtgcttcttttataaaaccatctgcaattaagtcttcaatagacgatggatttctattatgtttcaatgcatacgcttcaatttgactattaaccatttttacctgtgcattacaacctgttgattgtatgtgagcagtttgtttagcaatatttggaatgattaaaattaataataaactgatgattaataatactaatagcatctctatcaatgtaaacgcttgagtttttttagaaatttaaacatatattaacctccattattttatactttgcatcatttgaaacattggtaacataattactaaataaattgcgacaataaataaacctaaaatcaaaaataaaataggctgtaaaaactgagtctgttttatcgctttatcttctatttgttttactaatatttgcgaatataactttagttctacttctagctttcctctcttttcaccttgtagcacaaacttaattaattgaggcttaaagcattttagtttttctaaaatttgaggtaaaccatatcccatttctgaataagttaataagtatttacctagaaactgtctaaatggatcactactatggttaatataaacgtctactattgattgaagtgtaataccatttttataaaacaacactaattcattagttacaaaataagttttaaataattggaaataacccgatattagcggtagtttcatcacaaagtttatcttattgagcatatttaatttgttataaattaatttcataataatagccaacatagatactattatgagcattactacaattatagtaggtaagctggtaatgaaaaaagacaaagttttttgaaaagaagatagttgaatattcatagaagtatataattgttgaaactgtggaattactgtgaggtttaatataataatcatagcaataaaaatagagactagtattaaggggtattgcagtgtctttaacaatcgttgttctgactttctattcactttcatataatttacggtttcttctagaacgtctatgatattgccaaatctttctgccaaatatacttgcatgacgatagtatcgctataacctatcagtgataatatctggttgcatggtgcaccatttgaaatttcacttagaatggtggtgcctaattgcttatttttatatgtcatttgaagatttaaaaattgaaaactttgatacagagtgaaaccatatttcaacaaattacataaatttgaaagtaaatcgatttgttggaccttacttaattgtcgcttcttagaatgtagtttaaatgtatttatccattgtagtttcacaaatgacacctgcttttgtcatatcatcaagtttatcttctaagttcttaaatgatgatggtaatgaatgattatgggaaaagaaatatcggagttgttgctgagatagaatttcacatactaattgtcgctgttgcttaatagtagttacaagtcgttggtttataattaagttagttgcctgtatcaattcttgtacagaaatgcccatttctaatagccttaaaatagcacctttacaatcagttgcatgcaatgtagtcagaacaaggtgaccacttaaactagcctgtataacacacttggcaacatctttatctctgatttcacctattaaaataacatcaggatcacatcttaaaatagctttaaacgaatttacatagttaatgccagctttatcattcacattaatttggacaataccaggaatttgcatctctacaggatcctctatagaaattacatttaaattcaaggctttattcgcgtatgagaccatttgatacattaatgtactctttcctgaaccagttggcccactaaacaatagtaatccttgtttcttattcatgaggtgtttaaaatcattgaatttataagttgatttctgttgttgaaaaaattgaggtacaattctgataacacaactttcttggccaagtgacaatggtaaagttgatattctcaaaaaatatattttattgaaatggtaactatatcgaccgctctgtgcgacttgctgtgtagaaacatcaagcccagcttgaaacttcatataaactaataacttttgataaatgctattcccaatttgttcgtactgctccaagttatcattaattctaaatttaatacttacttcatttttaactggaataaaatgtacatcactcgctttcatttctatcgctttattaattatttcttgaaatagaatcttcaaaaaaacacctcctacatataatcacgtaggaggtgtttttattacttcaatttaaccgtgtaaaaatggatttaattgttcatcatcaaccgtcgtatatggaccatgtccagggaataaaggtaaatcgccttctaattcaaatattttatcttgaatagaatcaacgagcgtttcataatcacctttatataaatctgtacgtccgattccattattaaataatgtatctccaacaactgcgaattcatcgaacacatatgttaaacttcctggtgaatgtccaggtgtgtgtaacacattaaacttaaatccttctatttctgtgctaccttcgtttaacttttcaggagttaccttacttgtaataattggtaatccatattgcttaaatttatctgccccatttttaacgggatcttttagaaaatcaaactctgcttcatgcatataaaccggaacgtcgaatcgatcaactatatcatcgactgctccgatatgatcaaaatgtgcatgtgttaataaaatagcttttaacggtttatttatttggtttaattttttaataattttttcactttcacctgaagggtcaatcagaataacagctttgtcattttcgatgaaatacgtattagtatcaactaagcctaaagttaagcttgaaatcctcataggttttcaccactattttctaaatgtttttgtactgatgttagtttatcattcatttttctagatttgtctcgtcggtcatcaatacggatatttgtacaaactctacttaaacctttatcaaaaggtaattcatgtatcacttgcacaacttctaatacatcgcttaattcaccttcaattagagtattcattggtgttaattgaaaatcaattttacccatcgctttatattcttgaagttttttctgaatatctgcaatatatttactaacactcggaccttccgttccaactggaataacaaccacatcaacaatagccattattttaccccctctttatctaatacataggtcttgattaatcctgctgctcctgtaatacctgcatcattacctaatttcgcttgtacaatttcagtttcaaattgagcaggtgtaaatgttaaattatgatattctgttttaatattttcaattaaaataggtcctgcagtagacattcctccacctagaacgatatatttcggattacttgtaacactaataatactacataaatatccaatatagtttgcaaccttttcagtaatgaaaatacagaattggtcaccagcttttgctgcatcaaaaacagcttttgctgtaaccttattttctttaatcaattctaatatagaagatctaaacgtcaacttcggatagtagaagttgactaagttaacaacgcctgtcgctgaagcaactgtttcaatacatccagaacgaccacaattacatttaaatcgttgatcgaagtctgctctaaaatgacctatttctgcgccagagccattatgaccatgtacgatttcaccatttgaaataattcctccacctagtcctgtaccaagtgtgatggcaacaacatcatcggcaccttcaccagcacctttgtgtttctcccctaaagcagctatgttagcatcattatctacatacactggacaatcaacgaattgttcaaaaatctcacgtacattaactttttctggccaatataagtttactgctccatttactgtacctttttcaaagtcaacaggacctggtacaccaatacctacgccaagtacatttgaaaaattataattattttcatttactttttcaacaaacgaatcataaattcctttcaaaagtgtatatcctgtactatcagatgtatcagtgtgaatagaccatttatgtaattgttctaattcaggtgtgaaaatacctaatttacaagtcgttccgcctacatcagctgctaaaataatttttgtcatttctgttcattccttctctgattaattatcaacgtacatttcaaatattcttccttagataacagttcatattgatacaatgatgaaatctcctgttgaatcatttcgtacatatcatctggatttttaaaatatattagaaatccgtaacttttcaataactgttgtacatcataaaagttatttatttttcgactcatttgatttagtcaactctttttctaagttaatataatctgtatttttaggatctgcatttaatgctttacgcacatattttaatgctttttcatcatcatttaatgaacgatttgctatcgctaactcaaaatttaataaacctgatttaggaaacattctaagtcctcgctcccattctgtcataccttcagacttagaattgatagtagccataatcataccacttaaataatatgtttgatcatcggcataatttttatttattgtctgcttcacaatattttgagcattatcataattaccactagtcatatcatctttgatcaatttattataaatattatcttctttaattgtaaaaattctaatttgaagtgcaataaatataacaagcataccgattagtaaaatccaaaaaacattacgattcactttatagtaatagccaattaaagttattaataaaccaccaatgaagcctccaatatgcgccacaatatttatatttgacataaacagagaaacaccaactaatatcactaatgcaattaataactgtcctaacatttttttgttaaatgtttttgaaacatacatcatcgcaaaaattgatccgatcagaccgaatatagcaccactagccccaactgaaattgtagtcgtgttaaatgatagtgatacaaagtttccaaacagccctgcaataaagtatacagttaacatcctccatgaaccaataattgcttcgactattttaccaaaaataaacaatgaaagcatattcataagtatatgttcaaaactaaaatgtaaaaacatcgatgtaacaattcgataccattcaccatgcacgacattaaaatgcactaacccgccaacatctaataattttacatccgaaaaattatttaaatataaaatcatacataaccatattaagacatttacaaatattattgtgtatgttgccggtgaaaatttctgcatatatttatctaaaaagttatcggttaatactttgcgtttatagaacatatatgtctttttatcattatcttctgaaataagtctagccaaaaatatattcggcatatgttttatcaaatcttttgtgtgtcttataacattgaatttaattctaattggcgaaacttcatttaattgttcttctgaaaattccgattctgtaaaataataaaattcaaaaatttgtggttcgaaagaaataaaatttgctatttcatctttgtgttcaagcactttcgctttgtcaaaacgtatttcttgggtagacttgatatgttgtttaaaaatgactacttgtttttttcttttatgggctaaccaaatttcttggtcatctttttccctactgacaatatcaaaattcaagtacctaatccaataatatattgttttccaaaattgtttgtctatgttcatttagtcctccactatgctgattgatatataatcaatttatcgactggttgatcgaatgattccggttcaaatgatgttatttgaaaatcgtataataagcttattgtctttgtctgataattagctaaaaacctgtcataatagccaccaccatacccaattctatatccattgtcttgaaatccaacaccaggaacaacaattaaatctaggttattcgttgtttcaccttttgaagttggatagtaaatccccttcttatctacatcaatatcttttagattaaatatctctttaaaagtcatttgatgatttaaataatccattttcggcacaaaaatacgtttatgatccattaaggcttgttcaataatagaaaaagtatctacttcatgattaaaagaaagaactagcgcaattgcgtttgcttctttgtattcttcagttgcaaaaaattgatttcttaaccatgtgtctgcttttcgcttttcagctttattaaaagtcttcattttatgtaaaatgtattttctaatctcatttttagtcacattatcacccactttattcaattctattatatcgttaataacaatacatgtcattatgttgtcatgatgaattatgcgacaattctaaaatttattatttcaattgaaaatcttttatcatttcatacgtgtgcacaattaaaaaggtgaaacctcttattttgagatttcaccttttttattgttaatttaaatttaattttaatgattattttgtttcacggtgtaaagtttgtttgttttcacgtgaacagaatttcttcatttcaacacgttctggattatttcttttgttcttagttgtaatgtagtttctgtcaccacattccgtacaagctaaagttacgtttacgcgcatggttattcctccttatcatttctaaatacgactttattattataccaacatctataatatttgcaaagttaaaattttacaaccatgcgctacacaatcgtcaggttaaattttatttgtctttgtctttatttttattatctttacctaactgcttaaagtagtagttaattacatctctacctaagtctccacctgttaaccatggtggtggtacaggctgatttgtatatacaattgaaaacgctaattttggatcatcaattggcgcgtatcctatataagtagagttaactcttggctctccgttttggaacacttcagcggtaccagttttaccagcagtaggtactactgtatctttaaaactaacatatccagtaccatctttatcattaaatgccattttgaatccttcttgaatttgtttgatttctttttcagtattattaaccttgttcaagacagtgccattaattttcttcttgagtggaccaacatcatctttattagttgattcatgaatcgttaatccaatgtgtggttgtattctataaccatcattcgctatagttgaaacatattgtgataattgtaatggtgtataggtatcatattgaccaattgataaatctagataattacctggattatttgttaatggttcgatttgaccttttgtttcatttggtaaatctatacctgttttcacacctaagcctacttgattcaatcctcttcttagcttttgggcaggtgaacttatatctgatggtaaagccataccagaataataagggtctcccgctaattttaatgctgttttaaacatatatacgtttgatgaatgcatcaaagcttgcttatcattaatagatacatgcccgtttttattaaagtatgatcgttttgtcaaaccaccttggaaatgtaatggttcatcgaccattgtttctccaactttgatagctttattctgataaccagctaataatgttccaccttttacagaagatccaactgcaaattgagaagtaaacgtaccaatgtcataatcagtcattttaccactcttattaatctgctttccggcaagcgcaagaatgtctccatttttaggattttgtactaccatcatagcattatccatatcttttgcaccttggctgcgaagcttcttaatttgtttatctaataatgcttctacttctttttgaagatctatatcgatcgttaatttcaaatcttggccgcgagcgccaggatttaacacttctgaagatgtaactttaccagatttgtccgttgtgtatttcatttctttcttcttaccacgcaatacatcttcatattgatattctaggtaagattttccaacacgatcattgcgtgaatatcctttggataagtaatgttctgtcaattcttttggaataccttcagcaggtgtcgatacatctccgaatatacctcttaatgtatcgccataaggatattttctatcccagtccatcgatgtatttacacctggtaatttggaaagttgctgagaaactgctgcatactctttttcactgacatcttcattttttatcatttgtggatctaaaactgttcctgcattcatctctcgaaaaatggctaaaacttgtaaatctttagaagacaattcatctaattgtgattttccgattttcgataacagttgtttatcatattgatcttgtttaatacttccatctgctaacatagcttgttcttttgtcatcattgcttttgcttttttaggatgcaactgaatccagaaatcttttttatcacgttctgtaatcttcttagtatccatcttgattagctttgataacttttcagccgtatccaacatttccgattgtgttgtttttcgacccctagtatatgtaatagccattttagaagcattatcaactaaaactttcccatttctgtctaaaatacgacctcttggcacagactcattcactgtaatgttttcatcattttttataatttgtttataatgtgagccttgtgcgatttgtaaataacctaaacgtagtactagtactgcaaaaataaatacaatcacaccaaatataaagttaattctcttgttaattgtattttgaacgatttcatcatttgatttttcttttagtctttttaacaaaactacctacctctattcaaagtctttcactttaaatcatatatgaatttagaaattatttctatctttttgacaaaaaaataacggtctcatttaagagaccgaacaagtaatcatactttattttgttgcattatataattcgtcaactttttcccagttaactacattccaaaatgcgccaatgtagtcagggcgtttgttttgatattttaggtaataagcgtgttcccatacgtctaaacctaaaataggtgttttaccctcagttaatggattatcttggtttggtgtagtcacaatttctaactggccattgtttacaactaaccaagcccaacctgaaccaaagcgtgcagctgctttgtcagcaaattcttttttaaattcttctaaagaaccccattgttctttaattttttctactacagtacctttttcttctgagtttggtgaaagtaactcccagaataatgaatggtttaaatgtccaccgccattattacgtacagcagtttggatgttagctggtacactgtctaaattagcaacaatttcttcaatagatttagattctaaatctgtaccttctactgcagcatttaatttcgtaacataagtgttatgatgtctgtcatggtgaatttccatagtttctttgtcaaaatgtggttctaatgcatcaaatgcgtatggtaattttggtaattcaaaagccataaataatcatcctcctaaaatgtctgtaagtaaataataacaagcagtgactggttcaacaaagaatttgcttaaattctactacttattattttctctactcatttaatataactcaaatcaaaaataattaaacattttgtatataaaaagttaacagatttgccataaaatcatacgaacggagtatgaaataaacctttatcttctataatttaaaaaatgagatttatgcatacatctgaccaaatgtgcataaatctcatttctttatattaatcttggcaagactcacatacaccataaacttcaagtttgtgtttgtgaatattaacaccaggtagtgataattttatctgatctattggacaataatctattacctttgtatctccacacttttcacagataaaatgatgatgatgatggtttgtacatgctattctaaacttcatttcaccatcaagttctgtattttcaataatccctaaatctttaaataagtgcaggtttctatatattgtgtcgaatgaaattccaggataattttcatccataacttgttgtatatactttgcgtttatatacttatcttcttcgacaaaaatatctaacatatctttacgtttatctgtatattttaaaccgttctcttttaaaattttaatagcatcatttgtattcattgatattagctccctttttaaacttcattcgcattttctgataagccattgtaatcataagtaaaataactagtagaactacaattacaccacccggagaaatgtccatatagaaagctaggactaagcctaatattactgataattcacctaaaaatacacttagtaatatcaattgcttaaaactttttgttattcgcatacttattgcaattggtaacgtgattaacgcacttactaacagtatccctacaacacgcattgaggcagaaataaccatcgctacaataacaataaataaaaattgaatccatttaggaatgccaatgactttactatattcctcatcaaatgataatataaataattctttataaaacaatgtaataaacagaacaactatgatggcaatgacaataatcgttgttaaatcacttatattcactgcgcttattgagccaaatagcaatccaacaatttcttgattgaacccatcagctaatgaaatgaagattgcactcaaggcgataccagcactcattataattggaatagcaatttcttggtaagcagtgtatgacgttcttaatttttcaattagaagcgcacctactattgcgaataagattccaaaccacattggattaataaatactagtgttggcataatagtaagtaaaaacataccgaaggatataccacctaaagttacatgacttagagcatcagctataagtgatagtcgtctaacaacgataaaagcaccgattagaggcgcaataaaacctatcaagataccactaattaaagagtacctcataaaatcaaaattcaataatgcatctatcaattgtgacacgcctttccattttaaataaactcaaatctttattaattacaacattctcgattatgctgatgatcgacaaaacgtacaggatgtccataaatttttgaaatttcaacttcatcaagtgatttaaactcatcagttgtaccatggaaatgcaaatgcttatttaaacatgctacttcagtagcagtatctgctacaacaccaatatcatgagtaactaagataatagtgataccttcttgttttaattgatctaaagtattataaaattcacttacatgttttgcatcaataccattcgtcggttcatcaagtactaatactgcaggttctgaaatcaatgctcgagcaatcattacacgttgttgttgaccacctgataattctgctatatttttatgaattaaatcacttatattcagtctttctagtactttaatcactttttcattatctttgctattaaatgtttggaaaagacgttttgtctttgttaatccgcttaaaacaacttctttaacacttgctgggaaacctgaattaaaggcatttgctttttgtgatacatagcttaatttaattgatgttttcttatttttaaaatcaataccttcaacaaaaatctcaccactttgtaaaggtaataatcctagaatcaacttcaataatgttgatttaccagcaccatttggtccaacaattgctaaaaattcacctttatttattttaatgtttatattttctaacacttttttatgatcatagtagtaattgacatttttcaattcaaagactggtgtcatcgtattctcacctcgcattcaactatacaactcctggtaacatatgtaaacagtaatgtttacgactcaaaattagacaaaataaagagatatgcccccttcaagttttatttatcgcatttcttgaagagagcattatcatcttattgttgcataaccttattttttaattctgggtcaaattgctgttgttttaacatttcaatttcaagtttatatggcggttttttatttttcttatcttcaccaacataaggtgtttctaagattttcggaatatctttaaaactatcatgatgcacaatgtaatttaatgcatcaaaaccaatgtaaccgaagccaatattttcatgtcggtctttttgagcgccacggtcatttttagaatcattgacatgaacaactttaattctgtcgactccaatgattttatcaaattcatttaatacgccatcaaagtcctctttcacattatatccagcatcatgcgtatgacatgtatcaaaacatactgataaacgttcgttattatgaactccatcaataatacgtgctaactcttcaaacgagcgaccaatctctgtacctttacctgccatcgtttcaagcgcaatacgtacattattgtcattcgttaaaacttcatttaatccttcaataatcttattaattccggcatcaacaccagctccaacatgtgcacctggatgtaatacaatatctttagcgcctatagcttgcgttctttcaatttcttgttgcaagaaatctacaccaagattaaacgtttctggtttggttgtatttgcaatattaatgatgtatggtgcatgaacaacaatattagataagccatatttttccatcacttcatgacctttagttatatttaaatcttcaatacttttacggcgcgtgttttgaggtgcaccagtataaatcataaatgttgtttcaccatattcatgcgcttctatagcagaaccttctaacatctttttaccactcattgaaacatgtgatcctaataacataaaacacacctaaccttttttgttttgcttacgtttttgtctattttgctgcttactaaattgtttacgctcttgacgtttcattttttcaacttcttgtttaaatttcttcttataacctggtttaactttgtttttaattttacttcgaactttgttcttcacttgattagttaaatggtcatctttgcgcattcttgcttgacgctgattgtgcgctttaacttcttttaactcaccatctttaatatcaacagtattgaaaacaaaaccgcgatcttctattaatgaaatattgtgttcttcatcaggactataaagcgtaattgctacacctttataattcccacggcctgttcggccaactctatgtgtaaagaagtcaatatcatttggcacatcaaaattgatgacatgactaacaccttcaatatcaataccacgagatgctaaatcgctggcaataacgtattggaattctaaattacgtatacgtttcatttgttgtttacgttcacgtggcgttaaaccaccatgaatcataccaactttaataccagcttcatttagtgaacgtgctaaatcatttgcattatctctactattacagaaaataatacataagtatggatttagtatatcaattaaatttaaagtcttttcaactttagctgcacctttagtaggtattaaaaagaattcgatgttctttttattttgttttttactgtcgacagctacatattctggatgacttaaatatttatttaaaaatggttgtaactgttgtggaattgtagcactaaacaccgcaatatttgcattatcttccaatcttgcagcgatgtaatctacatcttcaattaatcctaagtcaatcataagatccgcttcatcaataactaaatatgatgctaagtgcacatgtaaatgtcccgttatagctaagtcattaattctagtaggggtgcctataatcaattgtggttgtgcattacaacgttgtctatctttctctatatctgtaccaccaataaaaactttaactgaaacgtcagctttaaattggcttaaatggttcgctgcatcgtatagttgttgtgcaagttctcttgttggtgcaaccacgattgcttgtggttcttttatttcactatcaattaactgcattaatggtaataaaaatgcatgagattttcctgtacccgtttgagattgaccaattaaatttgttctctttagtattcttggaataattcgattctgaatttcagttggtttttcaaaattaaggtctttcacagcgtcaattaaactagattctagattaaattgttcgaatggatgttttgccatgatttggcctccttatatattcatctttactattataaagtataaatgtgctattttaaataaaaatattaaaacctcgaaatttcaaaatttagaaatcccgagattttagtttaaatatattgaaatggatctgtattaattgtagatgcttcaacatctatatttattttttctgtattgaaccaattcattagtaacgtttttaaaccttctttcatcacatattcgctgtaatgattaatatcaattaagttcacaccctgaattttagcatctaaggcatcatgatgtttaatatcacctgtaacaaagacatctgcgccttgttgaacagcttgatattcatatccaatacctgaaccaccaataattgcaatacgtttaattttctgattagactcaccaacaaaacggacacttgggatatttaatttagatttaaaatcagctgcgaaatcttccaatgtcatttgattatccacttctgccataacgccaagtccataaagagatgtttgttttatctcaataaaatcaaataccggtgtttcatatggatggtattgtttaattaattgctcagcccttgacttttgacatgcatctatcataaattcaattttaacttcatctacatattcaattttatcaatttgtcctattgttggattagcttcaccaactggtttgaattgacctcttccttcactttcaaagaaacaatattcataattaccttcttgtgctaatccattttcactaagcttatctttaaatggtccaacattatccttaggtatatatgtttgaactttatagtatacatcttgttgattatttattattgaaatgttcttcaatcccatcgccttagccaacatcatattgacaccatgaggatttacatctaaatttgtatgcatcgctattaaattaatgtcatgttgaattagttttctaataatcgaaccataaccattagcttttaatgatgttacgcctttaaagattagaggatgatgactaataatagtattataacctttttctatcgcttcatttactacttccaacgtacagtctaatgctgttaaaacaccagtaacttcaacatcttcatcacctattaacaatcctacattatcccaagattcagcagttctaaatggcacatgataatctaacaatgtcattaaatcagctattttcattactataacaccctttcaattacagcaatttcgtcattaatttgagctaaacgttgatgatgttgttcagtattgagtttcgatttaatatgataaagtgcttctaactctctttgccatttttttataaaatattcatttttgttgttcaataattttggtccgaatttcaattcatcagatgatagctctattaattgcgtagaatattctgctacaacaatttcataaatatggcctttttcttccattattatttcatcaattatttcataattcaattgttgtaatgtttgtcttaaattttcagtttggatattactttgtaaaatcaaccttggatgttgacttaacttatcttgcccatcttttaaaattttagcaataagtggtccgcccataccacaaattgtgatattatcgattacatcctcaggatgaataacacttaagccatcccctaaacgtacatcaattctatctactaattgatttgcagctacatttttcacagcagcttgaaaaggaccttgaataacttctcctgcaataccgcaatcgcataaatggttttgaattgcatagattggcaaataagcatgatctgagccaatatccgcgattgtaccttgttttaaaaatcgacttaccgtcgttaatcggttatttaacgaaatcattttcttctcctttatgaaaaaagaggttgaacattattcaatgtaccaacctcaatcaagttaaatcttaatctaaaaataaataagcgcttattcatgtcttggtatcaatcattaaaattgatataaattaatccataaagtctttcaaacgtttactacgacttggatgtcttaattttctaagtgcttttgcttcgatttgtcgaatacgttcacgtgtaacaccgaaaactttaccaacttcttcaagtgttcttgttctgccgtcatcaagaccaaatcttaatcgtaatacattttcttctctatcagttaatgtatcaagcacatcttctaattgctcttttaataattcataagcagcatgatctgaaggactttgtgcttcctgatcctcaataaagtctcctaaatgactatcatcttcttcaccaattggtgtttctaatgaaacaggttcttgcgcaatttttaaaatttcacgaactttttctgctggtaaatccatttcttcaccaatctcttctggtgctggatctcgacctaagtcctgtaataattgacgttgaacacgaattaatttattaattgtttctaccatatgcacagggatacgaatcgtacgtgcttggtcagcaattgcacgagtgattgcttgtctaatccaccatgttgcatatgttgaaaacttaaatcctttgttaaagtcaaatttttcaacagctttaataagacccatattaccttcttggattaaatcaaggaataacataccacgacctacgtatcttttagcaatacttacaactaaacgtaagttcgcttctgcaagtcttgattttgctacttcatcaccttgttcaatacgtttggctaattcgatttcttcttgtgcacttaataagttaacacgcccaatttctttaaggtacatacgaactgggtcatttattttaacacctggaggggcactaagatcacttggattcagtttctcgtcagtatctgaactatctttttcattaactagtgaaatatcattatcatttaattgatcaaagaaatcatccatttgatcagagtcgatatcgaaattctgaagtttttcagcaatttcttcatgacttaaatgaccctcttttttacctttttcaattaattgcttcttaacatcttctaatgttaatgtcggatcaattgtttgttttttaattttaactgtgttatcagacatgaaacggcctcccgattttaaatatgaacattcgaaatttattcaatattgctattttaaactaaattcttaattaattcatccatatttttaattttattttacaaattggaactaatcccaatatttatttttcaatagtgttgtttaaatgcggtaactatcatttacccttatacattttgacataatcattattcgtagtattctttaaaatcacatgctacatgcgttctttattcttagcaacaatttgctgtaaatagtatttctgtaattctacatcgccaatccttgtagcttcccttaatttatgattcaatgactcaattgtttcttgtccgttttcattaataacattgacataatcatcaatttcattttcatatggttcatcattcaaactatattgttctaagctaattagtgtttctctcaactcatttgaattaacatactgcacagcatcactgatattatattgatcattttccgcataaaaatcatgtaagacttcgaatacatatttaaaatgctgatttgtgaagttatccttatcaacactttcataataatttaaaaatgtatctttatctctcattaaatgttttaaaaatgctcgctctgctttttcttgccggctcaaattgtcaaattgtgccataccaattggctcaggttcaatgtaaccgccatactcatcttctggataataattgactggtgcttgattgaattgtatttcgttagctaattgctcaggactaacattgaaaaatggtgcaacatcatttaaagccttttgttgcaaaatcgatgacttcataagtgaaatgtcatgactcagttctttcaaataacgttcatatgaaaggtcattacgtgcaatttcatcttttaatatactcactttataatgtgcaaatgactttttatcattttttacaaaagcagtaaatgcgtcgttgccatacttaccaatgtattcatcaggatccatgccagatggcaattgtataacaaatacatttagcccttgctgtaacaaatgttgacctgttttaagtgttgcttcactacccgcaaaatccccatcaaacattaatgttatatttgatgttaactttcgtataaaggtaatatgttcatctgacaactgtgtacccattgttgcaacaacgtttttcaagccagcagtatcagattttataacatccataaaaccttctagtaatacaatttcatctaattttctaattgatttacgtgctttatctaagttatataacaactttcttttttgaaagataggtgtttcaggactatttaagtattttggttcttgaccggtatatgttcgacctgaatatccaacaattcttccttgcgcatttttcaaaggaaacataatacgatttcgaaatctatcgtaataactgaagttttcttcgttacgtgataataatccggcttcatatgctaattcaatatcgtaaccctttttttgaagaaaatcatgacaaaaatgtgagctatcgggtgcaaagccaatgcctcgctctttaataagcgcatctgtaaaaccacgttcttgtaagtacgttaatgcttgttcgccttcgactgtctttgttaaagcgtaatagtaaaattcttgtattaactcatgcatttcaatcatttgtaaatcatcagaagcaatttgaacatttgagttagattgtgttgcctcaatatctacagcaacattaactctatcacctaattctttaaccgcttcaacaaatgatatgtctttaatttcttgagtaaattgaaaaacattgccaccttttttacaaccaaaacaatggcaaatttgtttatcttcagaaactgtaaatgaaggtgtcttttcatcatgaaaaggacacaaacctatataattgcgtcctctcttttctaattttacatattcacttaccaagtctaaaatgtcggttttatcttttatttcattaatgatcgattgatctattcgcaaattaaatcacctattaagcattagttatactattatacctaatttttgacaaaaatgaaatcatttcgatttattttgttcaatataatggattatatcgtttgctgtttcttcgattgctttttgagaaacatcaatgacaggacatccaatttcacttacgatttcttcaaagtaattcaattcttcttgaattcgtgcttctgttgcatatcgagctgtgtcacctagtcctaattgttttagtcgctcttttctaatgcgatttaatttctcttcacttattttaagtgcgatacatttctttggatcaatatcatataagccatctggcggtgtcacttctggtacaatcggtacattcataactttgtaacttttatgcgctaaatactgggataatggtgtctttgaagttctcgaaataccaagtaaaacaatatcagctttaggtaatcctttaggatctttaccatcatcatatttaactgcaaactctatcgcatcaattttcttgaaatatgcatcatctaatctatgaacaatacctggctcattataaggtttttcttcaaccgatgctgataataaatccattaatggccccataatatcgacggacttcaattggaattctgctactttctcactcatatattgcttcatttcaggtttaataagtgtataaacaatgatagcatttgtatctttagcaacttgaatcacttcatcaacatcttcaaaagattcaatatatggatatcttaataattcatttttacattgcttaggattaaattgtgaaatacctgccctagcaactaactctgccgtttcacctatagaatctgaagctacgataattttaattttttccattacttctcacctattctttatataatgctactaataacttagctattgttgttttggaaattcttccaattacttcatacttttgattatctttttttcttacaattggaatcgaatcaatttctttttcaatcattctatctgctgcgtatatgactaattctctttcctctaaataagtgacattaggcatacgtgtcatatttacactgataggtactgtatgaatatctgctccaatcattgaagctcttaataaatcttttcttgaacacacaccaacaaaatcgttatcttcattaataataaataatgtacttacatcttctaaaaaaattgtacaaatagcgtcataaactgttgtattctctcttagcacaacaggttgagacatatagtccttaacctcaaattgtcgaagtttttcattaaaaaatttaccttttgatttacctgaataataatatccaactcggggacgcgcttctaaaaaacctgacattgttaatatcgctaaatctggtctgagcgttgctcttgttaaattaagcttatctgctatttgttcaccagtaatgggtccttgagttttaacaatttcgatgattcgttcttgtctttgactgagttctataggtcttcaccccttttttattcacttattattataccgatatttctttcatgtcacaaacacattaattttacttgcctttaaataatctatcaattagaataaatgtacagcgagttaaggatagtgtaagcttaacaataagattggcgcaacgaatcattttaaaataaaagcgagtgactacactaatttgggtggaaccgcgggttaaatacgtaacttattttgtattatatacaatttaaaatattaactcgtcccatggaagtaaagcatatttactatgctgttattttccatggggcgttttcatgtatgaggagaggtaattatggcaaaagatatggatacaattgtttcattagcaaaacacagaggttttgtgttccctggtagtgatatttacggtggtttatcaaacacatgggattatggtcctttaggtgttgaattaaagaataatgttaaaaaagcttggtggcaaaaattcattacacaatcaccgtttaacgttggtatcgatgctgcaatcttaatgaatccaaaagtatgggaagcttcaggacacttaaacaacttcaacgacccaatgattgataataaagatagtaaaattcgatatcgcgctgataaattaattgaagattatatgcaagatgttaaaggtgatgaaaacttcattgccgatggtttaagttttgaacaaatgaaaaaaattattgacgatgaaggtattgtttgtcctgtaagtaaaactgctaactggactgaaattcgccaattcaatttaatgtttaaaacattccaaggtgtaactgaagattctacaaatgaaattttcttacgtcctgaaacagcacaaggtatttttgtaaactataaaaacgtgcaacgttcaatgcgtaaaaaattaccatttggtatcggtcaaattggtaaatcattccgtaatgaaatcactccaggtaacttcattttcagaacaagagaatttgaacaaatggaacttgaattcttctgtaaacctggtgaagaaatcgaatggcaaaattattggaaaacttttgcaagtgactggttaacaagcttaaatatgagtagtgaaaatatgcgtttacgtgatcatgatgaagatgaattatctcattactcaaatgcaacaactgatattgaatataaattcccatttggttggggtgagttatggggtatcgcaagtcgtacagacttcgacttacgtaaacatgctgaacactctggtgaagatttcagataccacgatccagaaacgaacgaaaaatatattccatattgtatcgagccatcacttggtgcagatcgtgtaacattagctttcttatgtgatgcatatgatgaagaaggcgttgaaggtagtaaagatgcacgtacagttttacacttccatcctgcattagcaccatataaagcagcgattttacctttaagtaagaaattatctggcgaagcgattaagatttttgagcaattaagttctaaattctcaatcgatttcgatgaatcacaatctatcggtaaaagataccgtcgtcaagatgaaatcggtacaccttattgtgtaacattcgactttgattcattagaagataatcaagttacagtacgtgacagagattcaatggaacaagttcgtatgccaatctcagagttagaagctttcttaactgaaaaaacaaaattctaattaaaaagactctccaccatatgtggtggcaatataatttataaaaagagatactggttagtaaaattgccagtatctcttttctattcgaaaaaggtattcaaataaacacatctatgtggctacttgaataccttttattattttatgttattgttccaatctttttaattggttgattagtttctgacttttaaaaaacatacctgcatattcacgatataacattaaaatgatatctgacatttcatcaataatttcttgatggatattcaatgaattcattttatctattggtaatttttgtaatacatctaataaatatagtgttttattcgataatataactgcatgtacatctttaaaagcctcttgccttgaaatcgcaccgtcaaacttaaaactataacctattaaatctgcttgtgtgtcattaccactcacagcacagcgattaaatgatgcggtaaaaccaaatcgtttcatacactttaacataacaacgactgacattaactgtgcagatgtacctgattctattttttcaagaacaaattgtaataattgatagttatatggtgcaatgtcaccttcatccattgagcgctcaatagtttcagctgccagagacgaataactgcttacgtaaaggtccatttgtaatttataatgttgactaataacatctacagaatttaacgttcccatacctcgccattgattgtaaataaacaaaccataaacaaacaattgcgtttgcgcttgtaaacccgtcttaacttttttagcacgtctagccataagtggtacttttgcaccatgctcatttaaaatcgtaataattttatcagattcaccataatcaactgctttgatgataatccctttttggcgcattaacaattatcttcaccacttttaagattaatcttggtcttcaacataaccaatttggcgaataaagttaactttgtttcgccagtctctttgaactttgacccataattctaagtaaactttagagcctagaagcatttctatatcacgtctcgcacgttttcctacttcttttaactttttaccgccttttccaatgacaattcctttttgcgaatctctttcaacatatatagttgcttcgatatgaacacgatcttcgctttctttaaccatacggtccacattaacaccaatcgcatgagggatttcttcacttgtaagatgaaggattttttcacgaatgatttcacccactacaaattgttcaggatggtctgaaatttgatcatctggataatatttaggtccttcgggtaaatacgtctttaatacatcaataaaatgatcgacatttagcccttctaatgctgaaataggtacaatctctgtaaaatccatataactttgatattcttcaatctttggcattaattcatctggatgcactaaatctattttatttaatactaaaaatactggtgtcttaacatttttcaacatttctataatatattcatcgcctcgtccaatttcctcattggcattaaccataaacatgattgcatctatctcagataatgtatttttagcgactttcatcatatagtcacctaatttgtgtttaggtttatgaatacctggcgtatcaatgaatattatttgcgcatcatctcttgtcattacaccttgaattttatttctagttgtttgagctttatcggacatgattgctattttatggccaatcactctattaacaaatgttgacttccctacatttggtctacctataattgaaacaaatcctgatttatgttctgtcatttattctaaatcctttcctgaaaatccaaatggtagtaactctgcgactgtcatcataaccatatctcctttatgatttgtcatatacacaggcatatcatcatcacataattccttcaaaacttgacgacatgcaccacatggtgatgacggtttatctgcatctacggttacagttattgattcaaaatcacctggtctgtatccttgagaaattgccgataccaaactagctcgttcagcacatatcgataatggataagaagcattttctacattggtaccataaaaagttctaccgtctttcgtttttaaataagcccctactttaaaatgactgtatggcgaatatgattcttgttgtgcttttctaacttcttgaaaataatgaggttgataactcatatatgcctccctaaaataacgctataaaatgtggtaaaaatactattaaacctataataaatgctaatattgaaactataagtacactaaaagccgctatatctttagcgtatttagctaaatcatgatattcaacggtcactaaatctacaacatattcaatagcagtgtttaaagcttcaacagtgagaactaatgcaatagcaatgagtataaatatccactcaatccgattaatatttagtacgagaccaaagacaatagcaacaatcattgcaaacacatgtaaaagaaatttatagtctttttgaattaagattttcagcccatcaagtgcatatttaaaccttttcataattagtctcgtgttaatccatatgcgtttaatattgtatcttgtcgaccaaacatttccttttcatccgcttcagtcatatgatcataacctaatagatgcaaaaatccatgtaatgctaaaaatcctaattctcgttcaaaagaatgtccgtaattgtttgcttgttcttgcgctacatccgtacagataattatatcccctaaaacacgtggtatatcaagaccactaaaatcaatatctggctcatcttcttctaaagcaaatgagattacatctgtaactttatctttatctctatatgttcgattaatttcttgtatttcttgtttatctacaaatgtaacagaaagctcagcatcgtcttctatatgctcctcttttttagcaaattctaataaatcttcaatttgtttataccaagcatctttaactaagcctgtgtgatcgctaaaatctatcgtaaacatttaattctctccttcataatgttcaatgattttacttaccaatggatgtcttactacatcgctctgatctaatttcaatatacttatacctttaacgttgtgtaacctactgaccgcttccttaagtccacttttaacacctttaggtaaatcgatttgagtttggtcaccagtaactaccatttttgagccaaaacctagtcttgttaaaaacattttcatttgcgcatgtgtcgtattctgcgcctcatcaagaattacaaatgcatcttctaatgttcgtccgcgcatatatgcaagtggcgctatttcgataatgcctctttcaataaatcgctctgtttgttcacgcccaagaacagtatataaaccatcatataaaggtcttaaatatggatctaccttttctttcaaatctcctggtaaaaatccaagtgactctcctgcttcaacagcaggtcttgttaatacaatacgtttaacagcacctttacggagttgctttgctgcataaactacagctaagaatgtcttacctgtaccagcaggacctataccaaatactaaatcattatttttcatggcattaacatatatacgttgccccatcgttttcgcacgaatcgtcttaccaaatgcatctttagttatctcttcatcatataaatctaacagatgttgaattgtgttattatgcgccattttaatagctgcttcaacatctttaattgtaatgttattacctaaatcaataaccttcagcaaattgattaatactgattccgctttttctacgttttctatttttgtacctttaacggcaacttcttgtcctcttgcatggatgacaacatcgaaactctcttcaattgcttttaaatgttcatcattatttccaattaaagcttgagattggttcatatcgtctatttgtataattccaggcatacacgcgctccttttcatatatcatttatattcattctatgatgctttaatatctacttaattatatcatgcaattgattgatttaaacatctttgcattgacttactcatttttctttaatttaataaaatcatttatacttttcaccttgtcataaaagcagattcaattttagactaatcaattttttgttgtaatttaaataactcatatttctcgaaagattctctttgtttttcaatttttcttaacgtaaaaaaacaagcaactaccattacgatagtgcttgttttcaaaaaattttataattgttttggtttagctaaaatttctgaccatatcataccattgattacttcatctttatcaaattggaacgctgatttagtcaaatctttttcgacattttgagaattaagcaactgctttaatttcaaacgttttgtacgttcagataagtatttatcctcaataatatctctagcacgtttttccattttagcaatttgcttttctttttctctatcaatgtcagtacgaatcgttttaatatcatctctaagtgatttttctaattgacgtctaatttcgtcagaattatcttgtctagaaggtctatgtttctgctccaccggttctgctttaggcactgtaattggtttctctgtcatcggttttgtttcttgttgttttttaggtgccataggttctacaacaggcttcgatttaggctcttcctttggaagttcatcgaataaaggtggtaacgtatcatcatattttcgtttcgatgatttcttttcttcttcatttaattcttcacttatttctttaaacgttcgctcaatttcttcaaaaaagccacctttttttggttcattatcggtagatgttttttgaggtggcttttgattttgtctatctttatgactattttcgcgcatagtagtaatgatagaaatgatcactgatatgacaaaaattagaataccgacactcatttaatcacctctcgacttaatgttcaggtgactcatcatcactttgatcagttcgtttattaattgcatttctcatgcctgtatcagcttcgatatttttcaaattataataatctttaacactgatattacctgaacgtaatgcttcagccatagccaatggtacttcagattcggcttcaactactttagcatgcatttcttgtacacgcgctttcatttcttgctcagttgctacagccatagctctacgttcttcagcttttgcttgtgcaatatttttgtctgctaatgcttgttcagtttgtaagtctgcaccaatatttttactaatatcaacgtcagcaatatcaattgataaaatttcaaatgcagtacctgaatctaaacctttgcttaatactgttttagaaatattatctgggttttcaagtacttctgtatgatgcttactagaaccaattgttgaaacgataccttcaccaacacgtgcgatgattgtttcttcaccagcaccaccaacaagtcgagcaatattagctctaactgtgatacgagctttggctttcacttcaataccgttcattgctacacctgcgataaatggtgtttcaatgactttaggattaacagacatttgaaccgcttctaatacgtctcgtcctgcaaggtcaattgcagcagcacgttcgaaaggaagatcaatgtcagcacgttgtgcagcaatattagcgtcaacaactctgtcaacatttcctcctgctagataatgcgattctaattggtttgttgttaatgctagtcctgctttgtgcgctttaattaatggcgctataacttttcttggagatacacgacgtaaacgcataccaaccaatgtacctataccaacatgaacgccagctgctaacgctgaaatccataaaccaatcggtacaaatgagaataaaataagtaatgcaactactataataactgctattacgataaaacttaaactaaacatggtatcgctccttttaattaatctacttccctcacaactactcttgttccttcaacttcaaggatttttaccgttttattgcgtaaaataaagttgccatctgaaacagcatcaatacgttcattttcacaaaaaataatccctgcaggtcgaagatctgtaactgtttgagcagtctttcctacgaggtgcgagcggttatcatgagaattgtaacctgactcagaattagttgaatcttttaagataactttatccaaaaacggaatctttctgttgaaaatcttcactaatatcacccattctacaatcgttaaaatcaaggcaacgataacattcgcaagcataaatagcaaattatcaccgagcgttgttatgcttatagttatcagtatcatgccaataataccaattactgcaccaactacaaataattcaattacaactaatataacgccaattgagaatattaagatagaatgcatattgacatttccttggattagaaatcccaaaaataaaataagtaatgataatgtggcgataataccagctgcattgatttttttagagtaaagttgatatacaaatcctaagaatgtcaaacaggttaatattaacgtaaaaataggttgaacaattatattactaacttgttcaacccaagtatctccagccgttgattccaagatagttgtcatttgtaaaaaattattataactcacaatttcacctcgccctcacattaattatacatgaaattgaatatactttatagttataagaacctatagaatatcaatttgattatttataaactatataacttttttaaattaaaaattgacaacaaaaaaacatcacatattagtgtcagacactaacttgtgatgtttattttatataattaatattcgtgttgagggagtcaacagaggtattaattatttgaatttacgtttacgtgcagcttctgatttctttttacgttttacgcttggtttttcgtaaaattcacgtttacgtacttcttggattgttccacttttagaaactgaacgtttaaatctacgtaacgcatcttcaagtgattcatttttacgtactactgttttagacatctgtatttccctccctccaaatatcaacggaactttatagtcaattgcacagtaaaactatgcatttataagtataatatatctgtaatttatggtcaattagtaaattgttttttatttgaaacatatttcacatcaaaatcacaaagacttttagattttgttctaaaaatctcttaataatttttttaatgagaagagttgcttatatagtaaattgtgaagccgttaaaacgacgttacaaaacctatatcttaaatacggaaccttatggtatgaatcaaggaatacttaaactaaaacttctctatcagatttatttgttgcaaaatcaacaactttaattgcttgcccttcatttaatggataatttgcttgcgtaattttaacttttacaatttgacctatgagtgattcgtcaccttcaaattgtactttcatataattatctgcatatccaactaatgtaccttctgtgtcaccctgttcctcaggaattacttcaagcacatcttgatcaaatttagacgcatataactttccgagttgattgcttagcgtaattaacttatgcacacgttcatttttaatttcttcatcaatttggtcatccattcttgcagctggcgtgccaattctaggagaataagggaaaacatgcagttcagagaacttatgctttacgataaaatcatatgtttcttggaactcagcttcagtttcacctgggaaaccaacaattacatcactcgtaactgccaagtctggtaaagctttatgcaattttgttaatcgttctgaaaatctatccattgtatacttacgtctcatacgttttaatactgtatctgaaccagattgtaatggaatatgcaaatgacgcacaacttttgttgaacgttctaaaacgtcaatcacttcatctgtaagttgacttgcttcaattgaagaaattcgaattcgttctaatccattaatcgtttcaagatcacgtaataattgggccaagttataatcttttaaatcttgaccatatccacctgtatgaattcccgtcaatacaatttccttatatcctgaattcactagttgcgtcgcttgttcaactactttttccggatctcttgaacgcattaagccacgagcccatggaataatacagaatgtgcaaaagttgttacaaccttcttgaatttttaatgacgcacgtgttctatctgtaaaataagggacatctaattcttcatatttacgatttttcatgatatttccaacaccattaattggttggcgttctttacggaattcatcaatgtaacctaatagtttatgtctatcttgtgtaccaactactacatcgacaccaggaatttccataatttcagctgatgaagtttgcgcataacaacctgttacacagattacagcatcaggattttgtcttattgcacgtctaataatttgacgactttttttatcacctgtattcgttactgtacaagtattaataacaaatacatcagcattcgcttcaaagtcaacgcgctcatagtttgcttctttaaataattgccagattgcttcagtttcataatggtttactttacaacctaatgtgtgaaacgcaactgttgacataaatattcaccccattaattctttttcataacttattgcacttaacgcatacaatggcgcagtttctgcccgtaaaattctcggtccaagaccaacaactgtactagtattactaaataatgaaatttcattttctgacaaaccaccctcaggaccaaaaatcatcaacactttatcctgagccttgaattgttgtaaagtttgcttgaaattgcttaactcaccatcttttgcttcctcttcatatgcaataagaatatagtcataattatcaatagtatcacaaattaattttaaattcgactcgaattgaatagatggaatcactaaacgatagctttgttcagcagcttctttaattattttttgccaacgttctatctttttggcaacttttgcctcgtttaatttaacaattgaacgttccatgctaacagctataaacgatgaagcacccaattcagtagctttttgtagcaaccactcatatttgtcagctttaattagtccactgcaaatcgtaacatcaactggcaattctgtattaatattttgtttttcttttaaatcaactgcaattttatcacttgttatatcagcaacttcacataaataaactgtttgatcattaaaagttaaaataattttactaccaacatcatatctcattacatttgttatatgatgaatatcttctttttttgtaataaaaaaacgctgacttacatcagcgttttggtctatgaaataacgttgcacattattcactcactttctggccaacaagacaaacccaaccattgtcatgttgttctgaaataattttaaaacctacacgctccatatgtgactgtataccttcatacttctcttttataataccagaagtaataaaataaccgccttcatttagagtattataagcatcttcaatcatttcatcaataatatgcgctaaaatatttgctattacaatatcaaatttttctgtttcgtctttcaataagttacctggaacagcttcaattaacgtttcacaatgatttcttctgaagttttctttagctacactcactgccatttcatcaatatccaacgctttaatacgttttacaccgattagatgacttgcaatacttaatatacctgagccagtaccaacatcaattactgaatgctgtggcaatacatttgtttctattgccttcaaacacatacttgtagtcggatgatcgcctgttccaaaagccatacctggatcgagctcaatgcaaagctcttcatccgcttctttagcatatgtttcccaactagggactattgtgaacttctttgacgcccggaatggatggaaatagtttttccattcattttcccaatccgtttctgcaatgatttgctcactgaattgaacgttatgttgatcaagttcatctaaatttaataactcatctttaattcgctgtcgcaacttatcatcataagtcatctcattaaaataggctttcaatcttactcccttatctggataatcctcttttttcaaagcgtaaatttcaccgtatttatcttctggttggttaattaaatcatctgaatcttctatcacgacaccatttgatccatgattttcaagtatattggtagccaattctactgcttcatgattaataataattgaaagctctgtccagttcatactttattctcccttaaaaaatctttttgctctatctttaaaattcgaaggttgctcattaatttcttcgccatttaattgggcaaattctttcattagttctttttgtctatctgttaatttagtaggcgttactactttaatatcaacatataaatctccgtatccatagccatgaacattttttatacccttttcttttaagcggaattgcttacctgtttgtgtaccagcaggaattgttaacataacttcattatttaatgttggtatttttatttcatcacctaaagctgcttgtgggaagctaacatttaatttgtaataaatatcatcaccatcacgtttaaatgtttcagatggtttaactctaaatactacgtataaatcgccagcaggtcctccattcacgcctggagagccttcaccagctaatctaatttgttgttcattgtcgacaccttcaggtactttcacttctaatttaactgttttattttcagtaccttttccgtgacatgttggacaagcttcttcaaattcttgaccacttccattacatttaggacaaacttgttcagtacgaactctacctaaaattgtattttgttctacagctacatgaccagcgccattacagtaactacaagtctttttacttgttccaggctttgcaccatcaccatgacatgtttcgcatgttacatctttacggattgaaatttcttttgttgtaccaaataccgcttcttcaaatgtcaatgtcattgtatactgaagatcatcacctttttgcggtgcatttggatctctttgtctgccgccaccgaagaaagagctaaagatatcttcaaaaccgccgccaccgaagccactaaaaccaccaaagtcagagccattgaatccttgtccaccaaaaccttgcggaccgtcatatccaaattgatcatagcttgcgcgtttattatcatcacttaaaacttcataggcttcagaaatttctttaaacttttcatctgcaccttcttctttgttaatatctggatgatattttttcgaaagctttcgatacgcttttttgatttcatcttttgaagcatctttactaatgcctaaaacttcataatagtctcttttggccacagctatctctccttttcttaattaactcatatagtttaacgtaatatgtcatactatccaaataaaaagccaaagccaatgttctattgactttgacttttcagatcatgacaacattctaattgtattgtttaattattttttgtcgtcgtcttttacttctttaaattcagcatcttctacagtgctatcgttgttttgaccagcattagcaccttgtgcttgttgttgctgttgagccgcttgctcatatacttttgctgataattcttgaatcactttttcaagttcttcttttttagatttaatatcttctatatcttgaccttctaaagcagttttaagagcgtcttttttctcctcagcagattttttatcttcttcaccgatattttcgcctaaatcagttaaagttttttcaacttggaatactaggctgtcagcttcgtttcttaagtctacttcttcacgacgttttttatctgcttcagcgttaacttcagcatcttttaccatacggtcgatttcttcgtctgataatgaagaacttgattgaattgtaattctttgttctttatttgtacctaagtcttttgcagttacatttacaataccgtttttatcgatatcaaacgttacttcaatttgaggtttaccacgttcagctggtggaatatcagtcaattggaatctaccaagtgttttattatccgcagccattggacgttcaccttgtaatacgtgtacatctactgatggttgattatctactgctgttgaatagatttgagatttagatgttggaatcgtagtgttacgttcaattaacgtattcatacgtccacctaaaatttcaatacctaaagatagtggtgttacgtctaataatactacgtctttaacgtcacctgtgataacgccaccttggattgcagctcccatagccactacttcgtccgggtttacacctttgttaggttctttaccgatttcttttttgacagcttcttgtaccgctggaatacgagttgatccaccaactaagataacttcatcgatatctgagtttgttaggccagcgtctttcattgcttggcgtgtaggttccattgttcttctaattaatgaatctgataattcctcaaatttagaacgagttaagtttacttctaagtgtaatggaccgttttcaccagctgagataaatggtaatgagatttgagtttgtgatacacctgataagtcttttttagctttttcagcagcatctttcaaacgttgtaatgccattttatcttgagataagtctacgccattttcttttttgaattctgcaactaggtagtcaataattacttggtcaaaatcatcaccgccaagtttgttgtcaccggctgttgatagtacttcgaatacaccgtcacctaattctaggatagatacgtcaaatgtaccgccacctaggtcaaaaacaagaactttttcatctttatcagttttgtctaaaccatatgctaatgctgcagctgttggttcattaatgatacgctcaacttctaaaccagcaattttaccagcatctttagttgcttgacgttcagcatcgttaaagtatgcaggtactgtaattactgctttgtcaactttctcacctaaatagctttcagctgtattctttaaattttgtaaaatcatagctgagatttcttgtggtgtgtatgatttaccttcaatatctactttataatcagtacccatatgacgtttaatagattgaacagtatttgggtttgtaatagcttgacgtttagctacttcaccaacttgagtctctccatttttgaaagctacaacagatggtgttgtacgtgaaccttcagggttttgaattacttttggctcatcgccttctaatactgttacacatgaatttgttgtacctaagtctataccaataattttactcataataaaattcctccatttaatcattaaattaatttgattttaaacaatgtcgtttcgccaaatttatgttattggtttactttgaccattgatggtcttaatactctatctttcagcttgtatcctttttgtagttcttgagtgatttcgccagatttaaaatcagggttatcatcttgaactacagcttggtgaatatttggatcaaatgcttcaccttcagttttaataacttcaagaccattatcttttagtgcgttaatcaaactttcatgcaccatttgtacacctttttgaagagatttaaaagtctcatcatcaccttcaatttgaagtgcacgttctatattgtctattgctggtaaaatatctgttaacacacgttgtgcttgatatgttttatttatttcattttctttttgaattctacgcttataattttcaaactcagcgtagagccttaaatatttctcttcgttttcatctgctaattgttgaagttcattaattttttgatcttttggatctatttcttcaataacattctcgtcagacgtttcttctattgcttcatcttgtaaatgacctttactttcttcagcttgttcaactgaatcatcaatattttgtttgacgtttgtttcttcaactgttgattcagtgtttttttcaactgattcgtctttatttgtcattttctgtcctccaatactttctaatccatcattaccaaattctatttaataattgaatgacattttgataatgcatagctgtaggtccaatcacagcaatttgaccttttaacgtttcatcaaaatgatattgacttgttacaattgaaatatcactcaagctgtcatcaatttcatcaccaatttttacattaatatttggtgaagatatatcttgtaataattctgcaattctatttgattctatatattgtagaatgggctgaattgaagatacattactttcattcaatgcatcaataagtttaacctttccacccatataaatgctattactttgattagaaatatgattattcatcgtatttaacaatttattgataaatatttcttcctgctctgattgaacaaaagagacaatatcatcttgtaaattctgattaaactcagttagtttgttagtaacaaaatttgatattgtatttagtttgtcattactaaacggcatgtctgaagcaagatgtacatgctcaacatgacctgatgaaaatacgataaccattataactaaattaggattagcacgaatcaaatgtacattattgataatatcttgtttatgattaggatgaacaactaaagttgtatattgagatatatttgataattcatctgcaaaatatgtcaatgctgatgatacatcatattgattctcaactaacaattgatttaatcgtcttaatttatttgttttttgatgagatgtttgttcaagtaaacgattgacataatacctaaaacctaattgtgatggcgaacgccctgaagaactatgtgtcttttcgatatagtttaaatcttcaagctgtttcatctcatttctaattgtagcaggactaacattcaagttatgtcgctcaattagtgttttagaaccaacgggttgtccaaaatcaacataatcctcaacaattgcgtttaatatactcaattgcctatctgtaatcatgttttcacctcattagcactcacttatctcaagtgctaattataatttatcaaattggtcaaagtaagtcaatgttaaagactcgatatttcaatttttttaatcatttattaggaaagcttcaaaaacctcattaccaatgactttccctcgatttgtaagtgcaatcgcatcgttcttttctacaattaatttcttctcttttaaattatttattgtttgaccaaagacactttcaatagattggtcaaacttctttttgaaccttctactactcacaccttcatttaaacgcaacccaagaaacatttcttcttccattctctcagtcaaagaaggtttatttgatactaaaattgctttactttctttatttatagctttgatataatgattcactggattgatattcgtataacgaacaccatctacataaccacttgcacctgctccaaatccataatattcctcattaaaccaataaaccttattatgttctgattcatggccttctaatgcaaaattagatatttcgtattgatggaaaggagattgttctatcttagacatcagcaactgatacatgtcagcacctaaatcctcatttggaagtttgagcaaaccttttctatacatattataaaattgggttttaggttcaagtattaagccgtaactcgaaatatgttgaatatccatatctaaagctagatctaaactttgttcaaaatcttcaatcgtctgtttcggtaaatgatacattaaatctaaactgattgatataatacctgcgtttttagcatttaacaccgacgtgtaaatatcttcagtattgtgcgttctacctaaaacagacaataactccggcttgaatgtttgaacgcccattgaaattctgttcactccatatttctctaatagttggactttctctttagttaactcatcaggatttgcttcaaatgaatattcacctgtgattgtaaacgtatcacgtattgctttaagtaatctttccaactgatcaatagaaagggccgttggtgtgccgccacctacatacatagtctttaagttcctatattttgctgtagacatttctgttattagtgcatctaagtactcatctacaggttgattctgtataaaatatttattgaaatcacaatatgtacatattcttacacaaaatggaatatgtatatatgcactttgtaccgtcattttaatgccccgcttctcagactgtttatccaatcggctatatcctgttggactatctgcaattattcttacttttaactttaacgtttaatcaataattgtctaatatatcaattcattttaatatttataaatgttaagagggagtgagatagaaataataaagaaccactaatgatttattatgtagtggctcttacacattagccagaggtaatatgtacttaaaaatagaattacatgagttaaactcatgcataagggagtgggacagaaatgatattttcgcaaaatttatttcgtcgtcccaccccaactcgcacattattgtaagctgactttccgccagcttctatgttggggccccgccaacttgcattgtctgtagaaattgggaatccaatttctctgtgttggggccccaccccaacttgcacattattgtaagctgacttttcgtcaacttctatgttggggccccattgttataagctcattttaactctgtcaatggctgccaatataacattgtaaagcccaggacgttaatttatcctaggctccctctttttagttattaaactttattcattgtaaattgttaatagattttttaaaaacttattcgtcatccattttcaacacagccaagaaagcatcctgtggaatttcaacattaccaactgctttcatcttagctttacctgctttttgtttttcaagtaatttacgtttacggcttatgtcaccgccataacatttagctaaaacgtttttacccattgatttaatatttgtacgcgctacaattttttgtcctattgcagcctgtacaggtacttcaaattgctgtcttggaattaacgttttaagtttttcaactaatgctttaccacgttcatatgcaaaatctctatgaactatgaagcttagagcatccactttatcaccgtttaataaaatatccatcttcactaaattactttctttattttcgatgaactcataatcaaatgatgcatatcctttggtattagatttaagttgatcgaagaaatcaaatacaacttcagctaaaggtaattcataaacaatatttacacgaatatcatctaaatagtccatatttataaattgtccacgtttacgttgacataattccattactgcacctacatagtcatttggaaccatcatagttgcacgaacatatggctcaaatattttatcaattttatcacgatctggcatttgtgctgggttatcaaccgtcacttctgaaccgtcccttaaaatacattgataaattacagatggtgctgttgcaattaattcaatgccaaattctctttcaattctttcttgaattatttccatgtgtaacatacctaagaaaccagttctataaccaaaacctaatgcttgtgatgattcaggctcgaattctaatgatgcatcattcaattgtaatttttctaatgcttctcttaaatcattataatttttgttatctattgggaacagtccgcaatataccattggattcattttcttataaccttgcaatggttctgatgcaggtctactagctaatgtgattgtgtcaccaaccctagaatcatcaacatttttaatacttgcaataatataaccaacatcaccaactgttaattcatcaactggaagttgcttaggtgtattaattccaacttctgttacttcgaactctttaccagtggccatcattcgaattttatctccggctttaacaacaccgtctacaattcttatcgatgaaattacccctctatatggatcatactcagaatcaaatattaatgcttttagtggtgcttctgggtcaccatctggagctggcacaacttcaactattttctctagtatctcttcaattccaatgttagatttagcacttgctaaaacaacatcgtcttggtctaaacctatcatatcttcaatttcttgtttcacacgttcaggttctgcagcaggtaaatcaattttgttaataacaggcaataactctaactcattatctaatgccaaataaacatttgctaatgtttgtgcttcgataccttgagccgcatctactactaatatcgcgccctcacaagctgccaaagaacgtgacacttcatatgtaaaatcgacgtgtccaggcgtatcgattaaatggaatgtataagtatttccatctttagcttcgtactttaaacgtactgcgtttaatttgattgtaataccacgttctctttctaaatccattgaatctagtaactgatcttgcatatctcttgtttcaactgatttggtattttctaaaattctatcagccaatgtagattttccgtggtcaatatgtgctataatcgagaaattccttatattctctcttctttttaagcgttgctcattatccattttatccttctcactttcataaaataaacccgtattatctttcgcatctttgatataataacgtttttaataggtaaatgcaaacgccataatcttggatgaactttgaaattataacaatctttatttaaatacatacttgcgatatgttaatatgttaattacgtacttataattataaaacgtattgattgtgtttccaacacaatttattaaatctgcaaaattttaagctaaccccatcaaataaatgattgcacaacggttagacttttgttaaaatatttcttgttgtaatcaaataaaattttgataagatgaactcacttttaggaggtgacagaaatggcaaatatcaaatctgcaattaaacgtgtaaaaacaactgaaaaagctgaagcacgcaacatttcacaaaagagtgcaatgcgtacagcagttaaaaacgctaaaacagctgtttcaaataacgctgataataaaaatgaattagtaagcttagcagttaagttagtagacaaagctgctcaaagtaatttaatacattcaaacaaagctgaccgtattaaatcacaattaatgactgcaaataaataatctttttaaataaaagttcaagcgcatgcttgaacttttattttttataaagatagaatgaataattccagtattaactgtttatccatatatgatgatttaagtttataatcagtttccgcacaagcatctataatattcaataattcatcaagttgataatgtcttacttgtcctaacgctaattttactctgtatggatgtacgcctattgttttagcaatttgctgtccactatatcctttttgactcagaatcttacattgataaaataatcggtaattacttgtaattagtgcaagtaatttaataggttcttctttcattgttattaaatcttttactaaatgaattgcttgttctttctttcttttctgaatgtattcagtcagtaaaaatacattttgttctaaacttctattgataatttggttaacatcctgcttattaattgttggtctatcgcctaaaaataaaatcaacttttctatctcttgtgagacaatattaaagttaatacctgtcaactcaataaataaatctaatgcatctcttttgatatctttgaaattctcatttaatttactttgaatccatttttttatttcttcttcagacatttgctctatttttttaagccttgcatgcttttttagagttttagttaacttttttctttcatcaagtttattttgatatatctcaaagacaatcaaattttcgccatcatatttttcaataaattctattaattgatctacattatgagccatatcttttggcgatttttcacctgtaaatatatatgcatttttaaccaaaattgcttttttatctgaaaagaaaggcaatgttaatgtttcttcaacaattggtgcaatctctgtttcgtataaattatatttcacaaagttaaagtcatctctatcacttttcaaaaattgtgatatgatttctgcactttgtttttcaaccaattcaggcacatctccataaatagctacaatattgtcgctcattcagtacaccctttcattcgtttaacacatcaatagattatatcatgtttctgtatctataaaccacttgcatttccataagagtttgaatcaacttttaaattatcatctaagtctattgtaacttgaccgttttgttggctattgtaaatgcgactgcgaatcctttgcaatcgtttaacaacttctatgttaggaagatgatacatattgttctttccagaagaaatcaaacttattttaggcttaatcatctctataaattctttagaactacttgtcttgctcccatgatgtcctacttttaaaatatcaatctccggcaagttatatttttttagaagtaaagattcattatttttactagcatcgcccattaataaaacttttttattttgatatgtaatcatagtaataatcgaatattcatttttatctcggctatttggaataaaactatcaaaaaatagaaaactactatctccaagtttaaaactactaacttgccttacatccataagtttaacgttatacttatggcttaatttcgataataacatcaatgtattactactatatcccttattgtatatcactatatgtttaattttaatatgactaataatatattccaattcaccaatatggtcattgtgtggatgtgttaaaattagatactctaattcatttatccctctttcatttagcgttggtaaaatatgatatttagaaattgaataactaggttgtttagtatcattaatcactttcccacctgtatcaatcaagacattttggttcttaccaccttcatataaaatactgtctccctgccccacatttaacattgtaattttgtgatgtgaatttgttggaaacgttattaataatgtcagaataattatagtccaaaacgtaaccaatatatatttacgtttagccaataaccaaaatatgtaataaacagaaattataaatattataaatatccaatcattaaacttgggaacagaaaaatgtgattgcttgattcttgtgaataggtctagtaaccagtcatgaaaattaaaacttaggtcaaccaagtaatttagcggcattaatcccacaataaaatgacttgtaataaagaataaaatagatagcggaaacaatataatcgaatagtatggtacaaaaatcaaattagataataatcccacccattgaagttgatgaaagtttggaatggcaacgataaatgaagctaattgtgcaataaacgtaattatgaataatgattgtaactttgacaattgctgtaaaaaaggaaaaagtagcataataaaaaatgaaatgatgaatgaaaattgaaatccaatatcataaacaactagtggattcaaaataaacataattataaatacaaatgctaatagctgaataccctttattttaatttgcttagtaataagcagtacaagcgttgtcattattatagctcttacagcacttggtgcataatttgtgtattgagcaaataaagctaatacaatgattgtaattcctttaatgacaaataaaggtaaatttaatcgttttaaaggttgataaattaagaatacaattgcagctatatgcgagccactaactgccagcaaatgatatatacctatctctttaacacgttccttaaattgctcattaatttcttttacgtcaccagtaatcaatgccataattcgatccggaaacttaatacccgaatcataaattcgattcattataaactgtttatgtttctcaattaaattagaccggttcgattctagacagctttgtacaactatactttgtaatttaagagttacaaacttattgtcaataactttgaattgtcctttaacaatacaattacgactttcaattttctttaaatcaaaattctttttatctgttaaaaagaaaggatatatttcattttttaaactcaacctacctttatatgtgtcactaccttgacgttgaatttggattacttgaacacgctcattaaactgaggattacgttcaatataattgatataattaaatattgcttgttgtgaataatgtaaataccatgaggagaaaatgattaaaaagagagaaataggggcataaacgattttatttttacgataagcaatatacaaaagtaaaatgaaaagaaatgtagagagcactttgctagaattccaaagcactcctacaatcattgataacgcgacatacagcaaaacattaacctttagtcagatatttagcaacatattctggtgaaaatggaatttttttaaattcaataccagattgtttgagtaatttagttgcatactcatggttatgataatcttctgcatagtagatacgctttatacctgcttgaataattgactttgtacaatttaggcatggaaaatgagtaacatagattgttgcatcttcagtagatacaccttgttttgcacattgtaataaagcattcatttctgcatgtatcgttctgatacaatgtccatcttcaattaaacatccttcatctatacaatgcacctcgccagctacagagccattatagccaccagcaataatacgattatccttaacaatcgttgcacctacagataatctttgacaagttgaacgtaatgctagcaaatgactttgtgccataaaatattcttcccatttgattctttccaagatgttcaccttccatacttaaaatttagtaacattttctaataatataagattaatcacaaaaaataaaatttgcaattaaaataatccattatgtcgtgaaataagatttcagtttatcaaaagttttacttccaaaaccttttacttttttcaaatcgtcaatttcttgaaatgcaccttgttggttgcgatattcaacaattgcattagctttagcttgccctactccaggaacagacatcaattctgatacagatgccgtatttaaatttactttagtattatttgtgttcccattttttacgtgcacactgtttgctccaaattgtggttcaacattcttttgtcctttatgaggaatgaaaatcattttttgatctgttaatttttcagacaaattaatttgacttacatctgcatcatctaataattgtgctttatcaagtaaatcaactactctatccttagatgtcattttataaacattaggatgtttaacagcaccttttatatcgacatatacaggacctttatttttggaatcatctccatctttgacctggacatcttctaatttggacaaactactattttcactagtgctttgtttcagagcagtatctttattttcaaaatctcttgaagtataatcatcttgtctccagaatataaaaccaattaataccataattaaaacaacagcacttataatatataacttccattgagttaaaaaatctttatagcgtaataaaaattgatacaataaaaccactcctcaactttatacacgtctgagcgagtggttttacttttattttttcgcaatgaaaaacaatctttctgcatcttcattatgttcatctatattaaaatcagtaaacgtttcaacatgtttaaaaccaacttgagttaaccaagacaaatatgtcttttcatcaaatgttctctgaaaatgagactcgtcaaatcttgaatatgtttcatcttcatgtcgaatgaaaaatgtcatatcatgataaacacttaaaggtaaatctccttgcacagcatcccatgctaaaaaaatgtcccctttatcatcaatataactttgattattaaacaaagtcatcattttataaacagtatgtacatcaaaaataaatacacctgaatcagccagatgatgataaacattgatgaatgtttcaataacagcagtttcatcttgcaaataatttagagagtcacaaaaaatagtgatgatatcaaattgttgttgcaaatcaaacgatgtcatatctccttcaagccaatttacatttactgatttttgagctgcaacagtcaacatatcaacacttaaatccataccagtaacattacctaaagcttctaattgaactgttaaactaccagtaccgcatccaatatctaaaatatttgattcatctttgcagtgattttttacaatttcaaaccatttttcatatggttgatcttgagtcaattgatcgtacactaggctcatttctgcatattgcgacataattaatacgcaacctgaccatatgattctaatggtgcatcttgatataacttttcaatattataataatttctttcgtctttatggaaaacatgtaccacaacatcagctaagtcaattaatatccaacgcgcttcattgtaaccttccatacgttttacttctatattttgttcattggctacttctttcaccgctctagcaatagcttgaacttgtcgttcattatttccgtgcgttacaacaaaataatctgtcatatcgctgatacctttcatttctaaagaaatcgtatcttcgccttttttattgtcaattgcatccacagcaattgctaataattcttgtgaattcatttaatcatcctttattctttcgtcactatagttataataatttaaacagtcaatcgtcttattatataccgtaatatctttctgtattaaaaatagtactgtacgtttagaaatttcataaattgtcttatctaaactaccttgattgtatgccatatctcgaatatcatcaactcctggaatcgttcttccaggttcgatgtaatctgcaataaaaatcagtttttcagtttttgtcatttgttgacgtcccgtagtatggtatttgatagccattaatacttcctcatcattgataccatattcatgttccatgattgctgcacacactgggccatgcaatatttcactaccataactcagtagatcattacctaattcgtattgtcgaacaatttgatacattttacctaaatcatcatatttacagaaatcatgtaatacacctgctaattctactttactagtgtctccatcataaatttctgctaatttaatcgctgtttctgcaactcttaaagaatgattataacgtttctctggcagtttctcttttgcaagccgttttgctttttcaatgttcatataatccttcccccttaatatagttttcaacggatttaggaacaagaacttggatagatttcccttcactaactctttgtcgaatcattgtcgaacttatatctaccctaggtatctgaattgcaatcataccattttcaacattttgactatttttgtctcgatttacaactacaaaagtaaccatttcttttaagtattcaatttgataccatttctctagttggttatactgatccgtcccaatgacaaagtacaactcactgtctttgtgttgctccttaaaagtcttaatcgtgtcataggtataactttgaccaccacgtttaatttcatcgtcgcaaatatctccaaaaccaagctcgtcgataatcatctgtatcattgttaatctgtgctgaacgtctataaaatcatggtgctttttcaatggagacataaaactaggtaaaaaataaaattcatctggctgtaattcatgaaatacttcgctagctactatcatatgtgcagtatggatagggttaaactgaccgccgtaaagtactatctttttcattattatggcaattcaatttctttattatctttagattctctataaatcacgatcatagatccaatcacttgcactaattcactacgcgtagcttcgcttaatgtttcagctaattcttttttatcatcaaagttattttgtagtacatgtactttaatcaattctctgttttctaacgtatcatctatttgtttaatcatgttttcgttgataccgccttttccaatttgaaaaatcggatcaatattgtgtgctaaacttcttaagtatcttttttgtttgccagtaagcatatgttattctccttttaattgttgtaaaactgctgttttcatagaattaatatcagcatctttattagtccaaattttaaagctttccgcaccttggtaaacaaacatatctaagccattataaatatggtttcccttgcgctctgcttcctctaaaataggtgttttatacggtatataaacaatatcactcattaaagtattgggagaaagatgctttaaattaataatactttcgttattcccagccatacccgctggtgttgtattaataacgatatcgaattcagctaaatacttttcagcatctgccaatgaaatttgatttatatttaaattccaagattcaaaacgagccaacgttctattcgcaacagttaatttgggctttacaaattttgctaattcataagcaatacctttacttgcaccacctgctcccaaaattaaaatgtatgcattttctaaatctggataaacgctgtgcaatccttttacataaccaataccatctgtattataccctatccacttgccatcttttatcaaaacagtattaactgcacctgcattaatcgcttgttcatcaacatgatctaaatacggtatgatacgctctttatgaggaattgtgatattaaagccatctaattctttttttgaaataatttctttaattaaatgaaaatcttcaattggaatatttaaagcttcataactatcatctaatcccaaagaattaaaatttgctctatgcataacgggcgacaaggaatgtgaaataggatttccgataactgcaaatttcattttttaaatcaccttataaaatagaatttcttaatacaacatcaacatttttaggaacacgaacgattactttagctcctggtcctatagttataaagcctagaccagagatcataacatcacgtttctctttgcctgtttcaagtctaacagcctttacctcattaagatcaaaattttgtggatttccaggtggcgttaataaatcgccaagttgattacgccataaatcattggccttctccgttttagtacgatgtatattcaagtcattagaaaagaaacaaactaacggacgtttaccacctgatacataatctatgcgcgctagaccgccgaagaataatgtttgcgcctcgtttaattgatatacgcgttgttttatttctttcttaggcataataattttcaattctttttcactaactaaatgcgtcatttgatgatcttgaataatacctggtgtatcatacataaatgatgtttcatctaatggaatatctatcatatctaaagttgttccagggaatcttgaagttgttactacatctttttcaccaacactagcttcaatcagtttattaatcaatgtagatttcccaacattcgttgtccctacaatatacacatcttcattttctcgaatattcgcaattgatgataataagtcgtctatgccccagcctttttcagctgaaattaatacgacatcgtcagcttccaaaccatattttcttgctgttcgttttaaccattctttaactcgacgtttattaatttgtttcggcaataaatccaatttatttgctgctaaaatgatttttttgtttccgacaatacgtttaacagcattaataaatgatccttcaaagtcaaatacatccacaacattgacgacaatgccctttttatccgcaagtcctgataataattttaaaaagtcttcactttctaatcctacatcttgaacttcgttataatttttcaagcggaaacaacgtctgcaaataacgtcatcacgaaacatattatgctctggtacaaaaccaggtttatttttatcttcagattgaagtgatgcaccacaaccgatacattttaaaatgtcagacaatcaattttcctcccatgtgatataaccttttttactgaaatgacgtaataatcgtctttcaattaatctattaaacttagtaataaagccatcagttcgtttaactggaacgaccataattgtatataaacctcgacgattaccaccaaatacatcagtaagcatttggtcacctataacaacagtttgatctggtctgatattcatcttagttattgctttatcaaacgctttccccattggctttctcgctttaaaaataaaatcgatgtctaaatgctgactaaaactagcaacacgagactcattattattagacacgattgtaatagtgattcctttttcattagcttccttaaaccatgctttaacacgttctgtaggttctttaacatcccaacctactagcgtattatctaaatctgtaataatacctttaacgcctttgtccactaacttgtctaaatcaatttgaaatattgattgaacatatgaattcggcataaaaaacttgcgaactaaacccatttaactcacctttacctttttataattgagacactaatgcttcaacagtttgacttgatgatacagctgctttttctaaaaatgcttcgaagctcatttccgcttctccatttgctaagtctgaaactgcacgaactacaacaaatggtacattaaattgataacatgtttgtgcaattgcagttgcttccatttcaaccgccatcgcatttggaaatgcttttttaattttttggcgttgttcaatactaccgataaagctatcaccacttacaattaagcctactttagctgttaattgttgttgttgtacaacttgagatactttttctattaaaggtttacttgattgaaatgctaccggcatctgtggtacttgaccatattcataaccaaatgctgttgcatccgcatcatgatattttacatcatcacttataagaacgtcacctacatttaaactttcatctaaagctccagcagaacctgtattaataatgatgtccggtttaaacttattaattagtaatgtcgtagaaattgcagcattaacttttccaatgccgctttgggtaatcactacttctctatcttttaaaatgccagtataaaatttaacatgtgcaactgaaatttcgcttaattgtgttaatttattttttaatattgttacttcttcttccatggcaccaattataccaatcatcctttgattcacctcttttaaaaaatcctagcatttgttattttatcacattttaatcactacaacgacaagtatcatgattttcgttactgtataaaacttttgctatatttttataaaaagctatcacaataacttggtatcttaaataattatttttgaactcataacagtgaaatcgatgcttctaatttgtgtatttttcaaaaactaatcatatcaattacataaaccaatggtgtcaagaaactttattaaataacgggaaaatgatatgtttaaaataataatgatgaaataagaggattttacaatggctgaaaataatcaaaatagtctcgtaacaaagatagctacatacggtagttttattgcaattgcgtcgtttgtcattttatttataagtatatttttaaagttttcatttaatatcgagtttacagcaacaattatgaacatatgtcgctatactttgattttaggatttatactaatgtccttacctgatgttgttgataaaaacatcaagaaaattatattcgatgcatttattatcatcgtctttatcttctttttattatagtcgttttattttgtaattacacagttaatcatatttgtttcgtatcgaattcccgtgtgcattaaagataattctaatataaaacagcagtaagtacttttctgagtgatagcctccttactgctgtttttatttgtaacaatataatgacaggtactttatatttcactgtcaaagatctttaatgattaactcacttaaattatgatttgaataaatagatatctaaatgcaatttgtcactattgatagttttattatcagcatacatttttaatacctcatgaccatactcaccatttaaattataaaaatcatattctacatttttttcatcatcattatgatatttaacataccctttaacaatgtcgccaccttgttcgtacaacttatacttctcattcaaataatttcttaattgaacatctaattcttgaatggtaacaattttctttttcgtttttactgcagttagttctatttctgtttgatgtccgtcaatccataaattacaaggtatattcttataatcatcgtacttattattgtcactaaaagtaacaccaccataactacattgcgttttattggcttctcccccatgacatccgtatccataatttccagcaaatatatcgatatccttatttataaatttctttgaaagtgcctcattttcgaattcaactttaaaatcttttttccaatcatcatttacgaacatgtcatgaaataacaaatcatgcttcaacagtctatcgtttgtttttttattttcaagatcagttggattagcaaatgacaccttagcattatatagacgcttggaatcaagtttacttttatgatgtaagtctgaatattcgattgcacttgctgaatttgtaaaaattccttctaacaataatattaaaataaatcctgttaaatatttaacttcaaactcccccaaaacaattattaatttacatttgagagcgagatataaatgataaagaaccacatatggtttattatgtagtggttcgtgagcccacaattttgattatgtatcacgctcataatacttttcaatttgaaatactctgttcgcaattattagttgagttatatcaaccagtacagtgtaaacttaaaaattccaaaccgtttaacagtatatcagaaaaaatgataattatttcaattatttttattaaatttcataatgattcatataatattcgcattaaaacatcacaatactgatacacaacaaaaagagcagtacatttgtcatgcaccactctcaacaaatatattttttcaatgaagcaattacgcgatcttacaaacactataggtatagctgaatcacatattacatttattttataatcgaatttagaaattcatcacttatctcataaattgttggtctacttttaattttaactaagtagttaccaaattttttaattgtattattaatttttactcttcctactcccaatatgttttctaaatcaattaatgttaatctatttcttttatttccaaacaatttatccattgaaaggagatataaaaattcataatctatctgtttataatgactagttaaataaagcgttaatttttcagtcgcatccatttttggtattaactcatcaagtattctttcttgtcctgctatcaataactcaagcattgtgtcaataaattccgtcaaatcaccacaattcaaatgatttgaagcagtcataaacgccttgtaatatttcgatttatttctatttatgacatatgaaaatgtcaaagcagtataattatcataataatcactcaagagcttggcaattataaatcttccaactctaccattgccatcataaaaaggatgtatatattcaaacagataatgactagccatgattttgaacggctgaggcgcatcaaaatattttaaaaatgttagcatttcacctatatattcaacaattttggtttcaggttgtaacccaacatgtatatatttattcgttgacccatcatgcacaccgacaaaatttttacgaaatagctctccatctaacttatcttgttcgttaatttcatttgaaactaatttatcataaatcgctctaatgtctcttacattatcaactttaatttttttattaagttctatttctttatattgatccacgaggcctctgaacttaagaaattctgatgcttggttatttaacgcatgtgcaatctcttgtttagtactaaatacattttcaatttcattagtactttgtaattcatcgattaataaatcattaaaatattgttctctagctgcataaggtaaagaattaagtgctctatcaatttttctactattaattgatattaattcttgtttttttgatagatttttagtcaccataaagaatagaggatattccacatcattaactttttttccattttccataggtatgatattaatattagtattgaaagaagctaaagaattaaatcttttagaatactcttccttcattttactttcattgtgttcatgaaaaatactttttaaagttctgtaacccatttgtagcctcctctactcatttaaaatgtatttttagctcaataaatccatttttattagattagctaaatattatcactttttttctttaaaaactatataaataactattttctcaatcaatagaaaaagatttttcatcacaacaaaaaagagcagtacatttgtcatgcaccactctcaacaaatatatctatttatgctttataaatgaattaccggaaatcaaaatacatcttgcctaatactaacaacatttacagtgatgctattagtcgaaatgtcttttaaaataactgaagtacttctttgaatgagaatatacctgtcaatattgtaacaagtactgcaacgataccaaagatgaacatccaatttgggtgtttataatcaccgacaattgatttctttttacttgcaatcaaaattgcacctaacgtaataggtaaaatccatccatttatcgcgcctgctataattaaaaggctgattggttttccaataaataagaaaatcatcgttgaaataacgataaacacaatcacaattaaattacttctttcgttaagtgatttatgaagtgtttttaaaaatgttgcgcttgtgtatgctgagccaattactgatgacatcgctgcagcaaataacacaataccaaaaatattctttccaattggtccaattgcgtgttcaaaaactgacgctggtggattttcagaacttagtgtcacacctgttacaacaactcctaataccgctaggaatagtaacgttctcataatacctgtagttaaaatacccgcaattgctgattgatttacaaatggtaaatattgcttacctttaatgccagagtctaatatacgatgtgcacctgcaaaggtaatataaccacctacagttccaccaactaacgtaatgattggcaagactaatttcattggatgttctggcgcaaatgtatgcacaaaagcatcaccataaggtggattagaaacaaacatcacatatgccacaactaaaatcatcacaataccaagaatcattgaaacaacgtccataattttttgtccacttttacttacaaagattaatattgcaaagattgcagtaatagctgcgccccattttacatctaatccaaaaattgcatttaaacctaaaccggcaccagcaatattaccaatattaaaagctagaccaccaaatgcaatcaatattgagataacagtaccaagcccaggaacaactttatttgatatttcttgacctcttaaaccagttacaactaatatgcgccatatattaatttgtgcaccaatgtcaatgataatagacagtaatatggcaaatgcgaaactcgccaaaaattgtgatgtaaatactgctgtttgcgttaaaaatgctggcccaattgcagaagttgccatcagaaatacagaacctaataataaccttttatggtttttagtaaattcaaaatcactttcacgatgtttaagctttaaatttctccccattttttagccccctataaggattgaatatcaatgccttctttcattaaaatttctctaattttcgaaacaaataataatgcatgttctccatcaccatgcacacaaattgtatctgcttgtaacgttacttccttattgttttttgaaataactttattttccttcaccatcttcaaaacctgcttaagtgcttcgtcagtatcagtaatcacagcatcactttcttttctactaacgagctgcccatcatcttcgtatcgtctatcagcaaacacttcagaagctgtaattaatccgacattctttgcttctgaaattagatatgaatttgctaatcctactaacactagtgatggatcaaagtcataaacagcttgtgctataacgcttgctatttctctgtcttttgcacccatctgatacaatgcaccatgcggtttaacatgattaattttaacttgatgaatgcgacaaaacccttgtaatgcacctaattgataaatcatcaaattataaatctcctcgttagagatatctatatttcgtctgccaaagcctttcaaatcaggtaaaccaggatgtgcacctactgcaacattatgtgctttggcaagttttaccgtttcattcattacattttcatcaccagcgtgaaaaccacaagcaacattcgcactagtaattaacggaataatttgatgatcaccaccaaaggaataatttccaaatgcttctcctaaatcacaattcaaatcaattcgcattataattccacccctttaacaatttgatgtttttctaaaaatttaatatcaacatcttttgcatctccatcacgatatagtggataatttaaaactgcatataaaaaatcggcagttgtagaaaatccatctatcaccatttcatctaaggtggctttcaatttatcaattgctgaagctctatcatgagattttacaattactttagctactaaagaatcataatatggtgaaacttgataaccgtgatatagtaaagaatcgactcgcacattaaagccttgtggtaaatgtaacgctgtcactttccctggtgttggttgaaatttcttttcaggattttcagcatttattctcgcttctatcacatgaccattaaattgaatatcgctttgtgaaaaaggtaaatgattatgttccaataaatacaattgtgctgcaaccaaatcacgttctgctcgcatctctgtaacagtatgttcaacttgaattcgagcattcatttcaataaagtaatgtgcgttatcagttactaaaaattcaatcgtacctgcacttctataatttgctgcacgtgcaactttaacagcatcgttacatatttgttgtcgtctttcttcagttaatgctgcacaaggagattcttcgattaatttttgatttttacgttgtacagaacaatcacgttcccctaaatgtacataattatcctgcccatcccccataacttgaacttcaacatgttttgcaacaggtataaaagcctcaacataaacacgatcatcatcaaagtatttttttccttcacttttagcttctttaaatgccttttctaaatcttcagctttctttacaatacgtatacctttaccaccaccgccactggcagctttgataacaactggataaccgatgtctttggcaagcttctcaatttcagacacatgattcacagcaccatttgatcctggaatcacaggaacacctgcatgatgaactgtttgtcttgctgttattttatcccccatcatttccatcgtttttttagtaggccctataaacgctatgccttgttcctcaacggtttgagcaaattttgttgattctgataaaaagccatatcctgggtgaattgcattagcaccagtgatttgtgcagcagatatgatgcggtcaatatttaaataactatctaaagcattagcttctccaatacatatagcttgatctgctaaatgtacatgcaagctttgctcgtccccttttgcataaactgctacagtttcaatcccatattctctgcaagctcttataatccttacagcaatttcacctctgttcgcaattaaacaacgaagcatttacttaccccctttacttaatacgtaccaaagcttggtcgtattcaacatttgtgccatgatcagctactatttcagtgatttctccagcaacatctgttgttacctcgtttaatactttcatcgcttcaacatatcctataatatctcctttgttaactttgtcaccgactttcacaattggttcagttaattctttactgtcttgtaaaaagaatgtacctaccattggtgatttaatgtcatgataatcatttgtcgaaacatcggagttatcattcacttttgaagctgtcaaatcattattgttcatactttgatttgattgattactgtgtgcagccaaatgattcgagtcagtgaagtcaatttctatttcatcttcaaaatttttaaatttaaatttcttaacatcattttccttcactaatttgattatttgttcgattttttcaatattcattttacaaatccccttttaaaattgttgctaattttttcgaagtatgtcgcaagctagatgtatcaaaaattggagccttttgatgactcttaagaatttcattaaacagagacatttgttcccgattcttatctacagcttcttggaatgatatccatttaaattgaattgtatcttgtggtttcatctgtgctaactttggaagatcaaatttgcatacagttgcaattttggtataaccacctatcgtttgtttatcattaagcagaataataggttgaccatcatttggtacttgaacactgccaagagcaaccggttcagaaatgatatctgcttgattaattggtgcaacgctgtcaccttccaatcgataccccatacggtctgattgttcagtgattaaatatgagtgatttacaattttcgctctagcctcttcagaaaatgcctcgaattgaggtccttgaagaatgtgtataatattattttctggcaataaatcgtcctgtaaatgaatagtctttccaatgttttctttaaagtcattatttattttcactgttattacatcattagctaataactttctacctttgaatcctccaatactgcttcgggtatgtgttgcataactttcagcaataggaggtacgttgatagaatgaccaaaagtaagataaccgcgtgcacctttggttatagcacctatttttaaaatgtcacctttctcagctaatatgacagaattcattgaaatagttttattatttagcgaggcattaacactaccaccggttataacaaatgtattttgcgtattaaattgaatggtaggaccaatcaaagtatattcaatcgccggaccatcattgttaattaatgactgcgcaaccttaaaactaaattgatccatggcacctgcgcctgaaaatccaatatgttcataaccttttcttgctagatcttgtaccgttgaaaagagacctggttgtaaaatcttaattgacatttttaatcaccacccagtcatcaacattaaagttgtcatctgatatatctctttcgatttgtataaattcctgttcatctattgcataaaattgtatccattctcctgcttcgtacattgacattggttcacgctcgctgctaaatacttttaacggtgtgcgtccaataatttgccatccgccaggagaatctgatggatatagtcctgtttgattattcgcaatacctacagaacctgcatgaatttttaaccttggctgattacgtctaggtgtatgtagttgttcatcaagtccgcctaagtatggaaatccaggcataaatcctagcatatatattaaataaggtttacttgtatgtttttcaataacttgctcaacagttattcgattatgctttgctacttcttcaatatcaggtccatatgtaccaccatatttaacaggtattttaataattcgattggtttgattcacagcatgaacatttttttcattaaatttgttaagttctaaattttcaattaatttagaagatgttatagcttgttcatcaaaatatattagaactgctcgatacgaagggacaatatcttgaatttctaatatttctttttctcgtatccatcgtaccattgctgtgacatttcgatatgtctcttcggatattttattttcaaaataaatcataattgtctgctcgttaataaatcttacatccactctaaatccccctttgtattgcaataaaccagtattgaataccttttcattgtatcattgagaagcacaagttgtttaataagtaattcaaatcgcatacaataacaaattataatcaatttgttttctcggaaatattttgattttttaaatggagtagttaatattgaaactcttacactaatttaggttctgctatcaatcggtctgatggaaaatttttacttttcatctgtccgattttttgattttgaatataaaaaagcacgaccgaagtatcattaacatacttcaatcgcgcaattaaacaatctattcaatcatttattggatattaacaatttttacgttcatttcgccaccattaggtagtggaacacgaacttcatcatctaaacctttaccaattaaagctttagccattggtgattcatttgaaatctttccattaaatgcatctgattcagctgaaccaacgatttgataactttcctcttcatcacctggtaattctacaaacgttactgttttaccaattttaacaacgttgttatctccagtatcttcaatgattaatgcatttcttagcatatgctcaattctttgaatatcttgttcgatgaatccttgttcatcttttgctgcatcatactcagagttctctgataagtcaccaaatgaacgtgcaactttaattttctctacaacttcaggacgcttaactgtttttaattcttcaagttcacgctctaatttttcaaaaccttcttgagtcattggatattgcttttgattttccatattgtcatcttcctttactgaattatactattgcttgctaactaaagactgaattttcgttgtcataatatctattgcaactttattgctcccaccttcaggaataattatatcagcatatttcttagtcggttcaataaattggtcatgcataggtctaacaacacttaaatattgattgataacagagtccattgaacgcccacgctctttagtatctcgtgttaaacgacgtaatattctcaagtctgcatctgtatcaacatatattttaacatccatcatatcacgtaataccttattttctaaagcgaaaataccttctacgataataacatctttaggtttaaaatcaatggtaatgtcacttcttgtatgactagcataatcatatgtcggtacttctactgctttaccatttttcaagtctttaagattttcaattaataaatcattatcgaatgcaaatggatggtcataattggtttctaggcgctcgtcgaaagtcaagtgcttttgatctttataatagtaatcttgagcaagtaatgcgacactatgaccttctaagtttttcataatttcgttagttacagttgtttttcctgagccagatccaccagctatgccaatgattgtagtagctttcattagccaatttcctttctcatcatgttgtttggatatatcgggcgatccactttaatttgaacgatttgtaatggatggcgcgccgcgtctaagctgttaccttcttcatcataaattgcttctactacttgtgtaaatgtttcaatttctggaccaaagaattctatttcttgacctggtttaaagttatttcgttgttgaatagtcgcaatctttgtatcttcattataatctaataccaaaccacaaaaatcaaatggtgattttttagattgttgttgaccaaacatctgttcttcataaccaggtgttccctcaaagaatgctggtgcagtgtctctatttgcacatttatctaactcaattaaccattccggattaatcttaaagttatcaggatctgccgcatacgcatcaatgactttacgatatactgagacaactgttgcaatataatgaattgacttcatacgtccttcaatttttaatgagtccacaccaatatccatcatttgaggaatagattcgattaattttaaatctttaggactcatcgcaaacggtgtaacttcaccttgattataaaatacatcaagttcaccattatcatcaacttctaataattcataatcccaacgacaactttgacagcaaccgcctctgttggaatcccttgcagtcatatgattacttaatgtacatctacctgaataggcgatacacatagcaccatgaataaatgcttcgatttcaatatctactttttccttcatttcacgcatttccatcgcgccggtctcacgtgctaatacaacacgatccaatccttcttctttccaatattctacagctttgtaattagaaagtgattgttgagtagataaatgaatttcaagttttggcgcaacttctttacatgtttcgataattaaaggatctgcaacaatgatacctgtcgcacctgtcttttccaaattacgcaaatatgattctagaccttcaatattctcatcatgtgcaataatatttgtcgtaacataaattttggcaccgtaacggttcgcaaattcaacaccttcagctatttcttccatcgtgaaattatcagcatttgaacgtaatccatattcttgaccacctaaaaatacggcatcagcgccataatgtactgctatttttaacttttctaagtttccagcaggtgctaataattctggtttcttcataactgttttaggagttgatttaatctcttctattgtcttcatgattaacctccttaatatactgtttgtttatataagaaaccttcgtcaaatggtcgataatcaggttgaatttcttcaattgggtccatcaacataaatttctcatcttcatagatttcaggatcttcattgtacaaatctatcgcctgacgatactgttccgttaccacattaatatattcttctgtttgtagaataccatcgattttaaatgaatctatacccgcctcaaaaaatggtgctaattcttcaattaaacaaatgtcgtttggtgacataatgtgcgtaccattgtaatcttcgtaaactgggtaattattttgtctttcttcatcataaagtaataaagattgttcatcattgcgacgttcaattttcatttggcgatcttggaacgtataataattgcctagtagcatacgctttgattggaacatacaagtcattccttgaacttgcacctcaatttccacatttgaattttcttttatattaataatttcatccaaattcagctcacgtgctaagacagctcttgatgcgcctcttttaccccagtaattacattgaaaatgattcgttactaacgtctctgcattccaatgaagtggtattggattctcttgcgccttcacatacattactactgctggatccccgaaaataattctgtcaactcgtatttcatgtaaaaaattaatataatcttctacagcatctaaatgataattatgaaataatccattcaccgccgcatatacttttttatcgtttttgtgagctaatgcgacagcctctgtcatttgttgtctattgaattcccctggaagtcttaaaccaaacttttgctcgccaattacaaaagcatctgcacctaaatcaataagtgtttccatatggcttaatgacttgggtgtgacaagtaattctgtcatagtcattctcctttaattgaaatcgctaatccatcgtctatatttaaaaaatttgttgtatatcctggttgctttattaaccactcattataatcttgaacctttttaaccatttgtcttacatttctcgatctaacaatcccaatatccgatacaaaaccgtgatataaaacattatctgtaattacgagaccttggtgctttaaaagtggtgtatatatttcaaaaaatttctttgattgcgcttttgctgcatcaataaatatcatatcataaactttgtcatttacattttcaaattgctctaaagcattaccttcaataattcgaacctggttttcaaaatgataagtagctaaattttgtttagcatattgaatcatcgtttcattacgctctatcgttgtgacatgaatgtcatcagatatagaagcgaattgcatagaactatagccgattgctgtaccaatttctaaaatatttttaacattattcatacgaattaattgcttaattaaatctaatgttaaacgatctacgattggcacttcatttacttcggcaaattcacgcaaaacttcgattgaactattttgatgttgatgtaaatctattaaatattttttatttaggtcatccatgttttaaacttcctttatgtaaaataagtcaatatgattatgacaataaaataaatcagccttcacaattgattataattttgccaaccaattaaatgactgatttcgtgttagacgcaaagctattttatttatagaagcgaatcattcatataaaatttaactttagatattttaccatattttcaataaaattataagcgttaattatttatacattgcttgacttaaaaaaatactcttgcctacccatcttaaggttagcaagagtaaaatctttttaattattcttccatttcagtatttacaacttcttcaatcatgtcccattcttcatcagtttcgattggtactaacttaccaccgtcacctgactcatctggttcattgatcattggtacaagctcaatcatatcgtcttcatctgattgagcaccttcttcagctaagataacatactcttttttgaattcaggatgataaaattctaaaacttttcggtataaaacttcatttccttcttcatcgaataaagttaataattcttcttcgttattaatttctagttgtgaatcatgattatgttcagtcatagtaaaatctccttttaatgtagtgaatctaaatagccttgtaaaataaataccgctgccattttatcaatcacttgttttcttttttgtcttgaaacatctgcttctaataatgatcgttcagcagccattgtgcttaatctttcatcccacatcacaatctcaatagaaggataagcttctaataatttttctttatatgttaacgaagcttcgcctcgaaatcctattgaattattcatgtttttaggtagtcctattacgactgtacccacattatgttttttaataatgtctactaattggtcaatacctaattcattattttcttcattgattcggagtgtgtctaatccttgtgccgtccaacccattatatcactaattgcaattcctaccgttctactaccgacatcgagtcctaaaattttatgttgtaacataaattatttattttgctcttttaaatagtaagaaacaagctcttccataataacatctctatcaatatgacgaatttgatttcttgcttcattttggcgtggaatatacgcagggtcacctgataataaataacctacaatttggtttacggcattatatcctcgttcatctaatgttcgataaacattatttaaaacatctcttacatcttgtgttggaagttcttcatagtcgaatttcattgttttatcaaagttttccatttgcgacactcctttaattacaaatataactcactatcatcatacaatattatggctttaaattatagatttttaatgtaatctttaataaagcttaatgattttgagatattttcaggttgtgtaccgccaccttgagccatatctggacgaccgccacctttaccaccaacgattggtgccatttgtttgataagatcaccggctttaacattatttgttaaagatttagggacagttgcaaccatcgatactttatcatcaacattacttgcaagaatgataattgtatcttgtagtttagatttaaaatcgtccattgtcgagcgaattgctttcgcatttggtacatccacttcagtaaccaatactttatagccattgatttcttcaacttgatcttcaatattacccattttaagtgatgtgatttctttgtcacgttgctctaattgttttaataatgctttttcttcatcttgcaattgtgttaacttatcgactacttgatcatcagatttcactttcagctgtgatttcatcgtattaaatttctcttgaatatcttctaaatataagaaagctgctttacctgttaatgcttcaatacgacgcacaccagctcctgtacctgactcacttactattttgaataagccaatttcagaagtattgcggacatgaataccaccacataattcaattgaaaatggtgccatatttactacacgcacaacatcaccatatttttcaccgaataatgccattgcgcccatttctttagctgaagcaatatccatttcttgaatgttaacgtcaatacctttccaaatttcttcatttactaagcgttcaacttgatcaatttcatcattagtcattggaccaaaatgagagaaatcaaaacgtaaacgatctgcttctactagtgaaccagcttggttaacatgatcacccagtactgatttcaacgctgcatgtaataaatgtgttgcactatggttcttttgaatgtcacgtcgatcattttggttcacttcagctgacactgtagcgccaacatttacttggccaaattgtactactcctttatgcaagttttgaccatttggtgctttggttacttcactaacagcaatttcaaaattgtcattatatacaatacctgtatccgcaacttgtccaccactgactgcataaaatggtgtttccgttaacatgaagtatactgtttcacccgcttcaacttgtgaaacttcttcaccattatatatcaagtgtgttagtgtcgtttgagctgtcgcagtatcataaccaacaaaagtacttgcagatgtaatatttttcaatacttcactttgaacttgcattgattgagaattttgacgtgcttgacgagcgcgatcacgttgttgttgcatttctgactcgaatgttgtcatatcaactttcaatcctgcttgaactgctatttcttcagttaattcaattgggaacccgtacgtatcatacaatttaaatgcatctttcccattaatttcatttgttgtcgctttagcttttttaattaattcatttaaaatcgctaaaccatcttctaatgtttcatggaatcgttcttcttcagactttataacacgcttaatgaaatctgctttttccttaacatttggataatatggttccataatgtctgcaacaatatcaacaagtttgtacataaatggctcattgattcctaacgtttgactaaaacgaacggcacgacgtaacaatcgacgtaatacatatcctctaccttcattggcaggtaatgcaccatcagaaattgcaaatgcaatcgtacgaatgtggtcagcaattactttaaatgccacatcttgttcgttgtttactaaatattgtttacctgatactttttcgatttcattcattataggcataaataaatctgtttcatagttagtacgtacattttgagaaactgaggccatacgctcaagccccatgccggtatcaatatttttattaggtaatggtgtgtaactatgatctttattatgattgaattcactaaatactaagttccatacttcaagatagcgttcattttctccacctggatacatttcttccgcaggatcatcttgtccatatgcttctccacgatcatagaagatttcagtgttcggtcctgatgggccttcaccaatatcccagaagttaccttcaatgcgaataatacgactttcttcaagcccaatatctttatgccaaatgttgtatgcttccatatcttccggatgaatcgtaacgtacaatttatctggctccatacccatccatttttcactcgttaaaaattcccaagcaaattcaatcgcttcttgtttaaagtaatcaccaattgagaagttacctaacatttcaaagaatgtatggtgacgcgctgtgaaaccaacattttcaatatcatttgtacgaatagctttttgagagtttacaattcttggctttttaggtgtttcacgtccatcaaaatatttctttaatgttgctacacctgaattaatccataataatgtatcatcatcaattggcactaatggtgcagaaggttcaaccatatgtcctttttcaacaaagaaaatctagatatttttgtctaatttcactcgcttttaactttttcatcatttacacatcctatttactgtttttaaattaccattccataaaaattgatgacacagatagtcgatttgaaaaactagtataaatcaatatcactttttattattaaaaaataaaaaacgcccatcctcaaaagggacgaacgttatcgcggtaccaccctagttataaatgcaattcaatacatttatcactttaaatcgactatacagttgtgcataaagtagcgttcactaatgtttgttgtacttttcaccaaccagtacatctctgataaacaaatcattaactactcatctttatacgaatttaattctattttagttacatttacgcttgttgtcaacgttctataaagtcatatggcgtgatttctcccatattaatcattgggtcaattttaaacattgtagcttccgttaatacatttgtatctgtttttgttgaatcagacgtaacttcttcactatcattcgatgacattggcgcttctacttgatcatctattgtcgtttgtgaagctactgtatcattagttgctgtgttttccagcatgtcttcatcttctgaattaaaataatttttcaacaatgtacataattgtgttaaacgcgcttgaccatttgttttcaatccaatatcaaatgcttctggatcaccaagtaaaactaaactcgttttcgctctagttaaaccagtatataatatcggtctttgtaacattctaaaatactgtttaacaataggcatgataacaataggaaattctgaaccttgcgatttatggattgatgtacaatatgcatgtgttaattccatcatatcttgtttcgtaaatgtaatttcattaccttcaaaatccacaacaagcacatctttattaagggcattttctttcgcccaaaaaataccaacaataactcctatgtcaccattaaatatgttatcatttggcctattaacaagttgtaatactttgtcaccttttctaaagactacatcaccaaactcaatttcacgtgtgtctttctttttagggtttaaaatatcttgtaaaacttgatttaaacgtttaataccagcatttcctttatacattggtgcaagcacttgaatatcagccatagtataccctttattaacagcactagtaactaccttctcaacaactgttggtatttggtttgcctgacagttaataaaacttctatcatgaaaacgctgtgtaatatcaattttctgacccaacttcattcgatgtgctaattctataatgcttgaaccatcttgttgacgatatacttcagtcagattaactcgtggtatagctttcgattcaattaaatctttaaatacttgaccaggacctacagaaggcaattggtcctcatcacctacaaatatcaattgtgcatctaaaggaactgcacttaaaaattggtggaacaaccaagtatctaccatagacatctcatcaatgattataagtcgtgcgtttatttcattttctaatatatcctctggctttgtgtcttgattccaacctattaaacgatgaatcgtcatagcttctaatccagttgactcttgtagtctcttggacgctcttcctgttggcgctgctaatacaactggataatcatcattgacataatcatcataatctaatgataagccatgaatctcagcatataattctacaatgcctttaattactgtcgtctttcctgttcccggtccaccggttaatagcatcaccttagaattgatagccgtttgcaaagcttctttttgtgaagctgcatagttcacttgattcgcatcttctatttcaccaatatgcatttgtaaatctgactgttcaatttctgtaagtttatttgtatgcgtctttattctgaataagttttgaacacttttgatttcagaataatacaaacttggaattgcaacttgttcattgtcaataattagtcgtttttcctcatttaagtattgcaacatttcgtctaatttttcaggttcgatgacctcttcatcttgataatttaatacatcaaccgttaaatctataacaacattgataggcaaatatgtatgtccctgtttaatacattcttcttctaacgtatagagcaacgcagcttttaatcgttcattatcgttataagcgataccaatatttctagcaagttgatctgctttattaaaaccaatacctttaatatcataaatcaattgatatggatttcgatctaaaatagtcagtgtatcaccgagataaaactgataaattgccattgaaagtttaggaccaaaccctaaatcatgtaaacgaatcattattttttcagattcttgatttgctgaaatttgttctgcaatttgtttctgtttctttttagataatcccgaaactttttctagaactgaatggtcatctaatatatcatttatcgcattgtcacctaatgtattaacaatattttgagctgtctttttacctacacctttaaacaaatcacttgataaataacttataattgcttctttcgtttgtggcatttctttttcaaaagtttctgcttttaattgtttaccataacgtggatgatcaacaacctgccctttaaatgtgtagacatcgccttcaacaatattcggaagaaaccctacaacagttggcattgtatcaaagtcttcatttgtttcaatagtatctactttaagcactgtataaaaattatcactgttttgaaacaatatcgcttcaacagtacctttgatcattgaataatcaaatagtgtagggtctgacatgttactcctcctctttcattttagtgaacgttttcagcgcatgctgacttaataagtgtttatggtcgatagtcacagcttctttaaaatgagttatggcttcatcaatatcttcatttttcataaataacgctaaacctaaattgtatcttgcatcaacatgatttttatcaatcgtcaatacatgtttaagttgagttatggcttcattaaacatttctaattgacataatacaagaccatattgaaattgaacttctgtatctttgtctttatctagttccgcagcagtcattaaatacggcaatgccagcttaaatgattctaactgattaaacgccataccgatcatataattacaatcaacttgttcaatctctgtttgtaatgcttgttgatataatttaatagcttcttgataacgttgctgattataatatacatttgctagattataaaatacgacgccattcttcggatctattgttaaagctttttggaaaaaacgctctgccttttcaatctcattcgcatcagcaagtacgataccagcattaatataattttcaataattgtaggatcttcttcgatatttccgaacaatgcttgtaacgcttcttctatttttccattttgtatgtattgataaattgtttgttgatctatcatttacgaacctcatttctcatcaattataacatcttgataaattgtatgtctcgaatcacttaacaacgaattaaatataatctaatatcatcttcattcatgaaaaagcgggaatggaatagaaatgctaaagaaccattaacgttttattatgtaatggttcttccacattagccaccactattatgtacttaaaaataggaatatataattagactcatgcatggagagtgggacagaaatgatatttttacaaaattaatttcgtttaccccaactcgcattgcctgtagaatttctttacgaaattctctatgtttgggccccgtccccaactctcattgcctgttgaatttctttacgaaattctctgtgttgatgtcccgccaacttccacattattgaaatctgattttccgtcagcttttatgttgggccccgtccccaacttccattgcctgttaaaattctttaagaaattctctgtgttgggccccgccaactcgcacattattgaaatctgactttccgtcagcttctgtgttgggggcccgccaatataacattgtagagcctaggacattgtgatgtcccagactctatcatcatgaattattctcatcaaaaaatgtctttcgtcatttccaacgctgaaacttcaaataagtaatttattgttgtcattgtttaaacaacataatttaattgaccttcatttttgaacacatcgtcaattgttgctccaccaagacacacatcaccttgataaaaaacaactgcttgtccaggtgtgattgctcttactggctcagcaaaagtaacacgtagtgcatggtcgttttcacgtttcacaaaaactttcgtatctttttggcgatatctaaatttagctgtacattcaaaaccttgatctaagtcattatcttctggatttacaaatgaatagtctgaagcaattaagtaatcactgtataatgcatcgtgatggaatccttgttctacatataaaacattatcttttagatttttaccgacaacaaaccaaggatctccatctccacctatacctaaaccatgtctttgtcctattgtgtaatacatcaacccactatgtttacccattttcttaccatcaagtgtaatcatatcacccggttgcgcaggtaaatattgagataaaaatgttttaaagtttttttcgccgataaaacaaatgcctgtagaatcttttttcttagcagtaacaagtccttgttcttcagcaattcgacgcacttcactcttttcgatgtcaccaattgggaacatcacttttgaaagttgttgttgagataattgattcaagaagtatgtttgatctttattattatctacaccacgtaacatttcaacatgaccatcttcatgacgatgtatgcgtgcataatgtcctgttgctacataatctgcacctaaattcatcgcatggtctaaaaaggctttaaacttaatttctttattacacataacgtctgggtttggagtacgaccttttttatattcatctaagaaatacgtaaagactttatcccaatattctttttcaaaattaacagcgtaatatggaatgccaatttgattacacacttcaataacatcgttgtaatcttcagttgcagtacatacaccattttcgtcagtgtcatcccagtttttcataaatatgccaatgacatcataaccttgttcttttaagacgtgggctgttacagaactatctacaccgcctgacataccaacgacaacacgtatatctttatttgacaattatgactcctccttaaatttaaaatatattttatgaatttcagctacaattgcattaatttcattttcagtagtcaattcgttaaaactaaatcgaatcgaatgatttgatcgctcttcatcttcgaacattgcatctaaaacatgcgacggttgtgtagagcctgctgtacatgcagatccagacgacacatagatttgtgccatatccaacaatgttaacatcgtttcaacttcaacaaacggaaaatatagatttacaatatggcctgtagcatccgtcattgaaccatttaattcaaatggaatcgctctttcttgtaatttaactaaaaattgttcttttaaattcattaaatgaatattgttatcgtctcgattcttttctgctaattgtaatgctttagccatcccgacaatttgtgcaagattttcagtacctgcacggcgtttcaattcttgttcaccgccaagttgaggataatctaatgtgacatggtctttaactaataatgcaccgacaccttttggtccgccaaacttatgagcagtaatactcattgcgtcgatctcaaattcgtcaaacttaacatcaagatgtccaattgcttgaaccgcatcaacatggaaatatgcatttgtctcagcaataatatcttgaatatcataaatttgttgcactgtgccaacttcattatttacaaacataatagatactaaaatcgtcttatctgtaattgtttcttcaagttgatctaaatcaatagcacctgtatcatcaacatctagatatgttacatcaaaaccttctcgctctaattgttcaaaaacatgtaacacagaatgatgttcaatcttcgatgtgataatgtgattacccaattgttcatttgcttttactatgcctttaattgccgtattattcgattctgttgcgccactcgtaaatataatttcatgtgtatctgcaccaagtaattgtgcaatttgacgtcttgactcatctaaatatttacgcgcatctcttcccttagcatgtattgatgatggattaccataatgcgaattgtaaatcgtcatcatcgcatctactacttcaggttttactggtgtggtcgcagcataatctgcataaatttccatgtttggacactcctcacaattttatcaatgttccaataatagcaccttacatactatttttctacttttctgtttaactttatttataatgtttttaattatattttaccattttctacacatgcttttcgataggctttttaagtttatcgctttattcttgtcttttttataaattttagtatttgcagatattttttcatttgtaaaatgtaacgtactattattttggttatgagcaatttaatatttatctggttattcgattggtatacttcttatatcaaaaaaaaggaaggacgatataaaaatggcgattaaatattcagcattaaaccttgtccctattcgagaaggtgaagatgaacgaacagcaattaatgatatggttaagctcgcacaacatttagacgaattatcatatgaaagatattggattgctgaacaccataacgctcccaatctagtaagttcagcaactgctttattaattcaacatacgttagaacatacgaaacacatacgtgtaggttctggaggaatcatgttacctaatcatgctccattaatcgttgcggaacaatttggcacgatggcaacattatttccaaatcgtgtcgatttaggattaggacgtgcacctggaacagatatgatgaccgcaagtgcattaagacgagatcaacatgatggtgtttataaatttccggaagaagtttcattattacaacaatatttcggccccgctcaccaacaagcatatgttcgtgcttatccagcagtaggtaaaaatgtgcctttatatattcttggttcttcaacagattctgcacatttagctgctcgcaaagggcttccatatgtgttcgctggacattttgcacctcaacaaatgaaagaagctatcgaaatctacaaaacgttatttgaaccttctgatgtattagacgaaccttatgttattgtatgtttaaatacaatcgttgctgaaaatgatgacgaagcacaatatttagcttcatctatggcacaagtaatggttagtatcactcgtggcagattgcagcccgttcaaccgccaacacatgaactacaaaatatattaacgccgagagaatatacgatggctatggaaagacagaaaatatcattaataggttcagaaaatactgttcaacaaaaaattcaagattttatggaaacttatggtgaagtcaacgaaattatggctataagttatatttatgataaagatatgcaattagactcttatcgtcgattcaaaaatgttataaatcagttaaatgaaaaaaacactttataatgtgataaataaactaagtgaaagtatgtatccataatattaataaaaataaacagtaacagcattttgaataaaagttgtctttattgttcaatcatttattttagtaatgattcaaattcacttaaaattctaatgcaaatattaaagcgccccttcaattttacactgtgtaagtgtttatttgatggggcgctttcaaaatattgaaaatcatatccaaaatttaaagaaatttatttctctttatcttcattttcttttttctcttcgttattagatcctgtatattcatttatcttatcttttacattttcaacttgttcattatcgctatttttaaatttttctactgcgtctttagctttatccataaaactcatattaatcgctcctcttatatttgattagtttaattgaacttattttttaagtttatcaattgcatcagttattttgtttttagcattttcaacaacttcttttgctttaccagtcgctttatcttgctgaccttctttttctaattctttgttatcagtaacgttacctactgtttctttaacattgcctttaaattgatcgaacttactttcgtctgccatagtgaaacctccttagatgtatatatttatataccacaaaggaggttcgctaaacattataatatgaagtttttatgttatagtatagtatttatacgattaaatataaaacatgtatccgtctaaatcttcacttgtatctacatattccgctaaatatttcaatgttgtattatctaaaacatctctcactgcatctctcatgcgaatccatagttgtttttgcgcaggtggttctgattcaatactttcaacaaatgtaattggaccttctaacagtcttataatatcccctgctgagatttcttccgctggcactcttaattggtatccacctttagcaccgcgtacacttcgaattaaccccgcatttcttaaaggacctacaagctgttctaaatataaatcactcaaattattttcttcagcaattgactttaatgatatacatccttgcccctcttttttagcaagagaaatcatcaatgtaagtccatatctccctttagtagaaattttcattgtataacctcacttaattcgaatattgatattcccattttagcattttttgagttaagatagtataagaaaggtgtgacaaatgtgagtacagaaccattagcgtcgagaatgcgcccaaaaaatatagatgaaatcatttcccaacaacacttagttggaccaagaggcattatcagaagaatggttgacacaaaaaaattaacttcaatgattttttatggtccacctggtataggcaaaacaagtattgccaaagcaatttcgggcagtacacaatataaatttagacaattgaatgctgtaactaacactaaaaaagatatgcaacttgttgttgaagaagctaaaatgtctggtcaagttatcttgttattagatgaaatccatcgactagataaagccaaacaagattttttattacctcatttagaaaatggcaaaatcgtcttaatcggtgctacaacttcaaatccttatcatgctatcaatccagcgattcgttcaagagcgcaaattttcgagttatatcctttaaatgacgaagatgttcgccaagcgttaactcgtgcaatagaagatgaagagaatggtttgaaaacatatcaacccaaaattgatgaagatgctatgacctacttttctacacaaagtcaaggtgatgttcgtagtgcgctaaatgcattggaattagctgtattaagcgcagataatgacaaggacggttatcgacatgttacattgcaagatgctaaagactgcttacaaaaaggtgcatttgtaagtgataaggatggtgacatgcattacgatgttatgagcgctttccaaaaatctatccgtggtagcgacgtcaatgccgctttacattatttagcacgattaattgaagctggagatttacctacaatagttcgacgattacttgtaattagctatgaggatataggcttagcctcacctaatgctggtcagagaacacttgctgctattgaatcagcagaacgtctaggtttaccagaagctagaatcccactaagccaagcagtaatcgaactatgcttatcacctaagtcaaattcagcaatgagtgccattgatagtgcattgtccgatattagaaacggtcatgtgggccaaattccaaaccatttaaaagatggacattatcaaggtgctaaagatctaggccgatctattggttacaaatatccacaccaatatgttaatggctatgtttcacagcaatatttacctgataaacttaaaaacaaaatttattatgaaccaaaaacgacatctaaaagtgaacaacaactcaaagaaatatataacaatttacttaaacaaaggccataaaaataagattaaatcgattacctttgatattttagctataatcaaaacaaaactgactagtacacgaggcatattctactatgcttgtgaactagtcagttttagttttatggtatggttacacttgccttacgttgaaaattatgactttcaattttaattattgccctttgtctttaatgcgacgaactggaatatcttttaaaacgtcattcaccacataacttgcacaaattaatccaacaacacttggcacaaaggcatttgaagaaggtggcatttgtccttttcgattgatagcatttttatctccaactatatcttttacatcttctcttatgacaattggactttcatctgaaaatacaactggaattcctttacgaattcctagttttttcaatttttgacgaataattttggccattggatcggtatatgttttagagatatctgaaattgtaaaacgtgttggatctgttttatttgcagcacccatactggaaatcactttaatccctcggtcaagacactctttcattaagtgtactttgtacattattgtatcacttgcatctacaaaataatctatatcgtaattatcgaaaatttcttcatatgtctcttctgtataaaacatatgtaaaggcgtgactttacaatctggattaattaatttaatacgttcttccatcaaagaaactttactttgtcctaccgttgtagttaaagcgtgtaattgtctgtttacatttgtaatatcaacatcatctttatctattaatataatatgaccaatattcgttcttgctaatgcttccgcagcaaatgaaccaacacctccaacgccaagtatgacaacagtttgttgcttcaataaatctaaaccttgttgtccaatcgctagttcatttcttgaaaattgatgtttcattattttacctctttcactgatttatacataagtacatagtaacttaaaattttatatttagcattattgctttgattatttttccaaaattcaacgagaaaacaattattaaacgctattaaacccaactaattctttattaaaaacttaaagaaaagcataaaaatacgcaagacaaagtcttgcgtatcgatagagtccgtattgccgtagttataatagcttgatcattcggcctgttatatacaggtgggtgccctgtttcttgttttgtacgtccttcatataaggcgtgtacgctgcaagaaaacccattgggctcccttgatcaaagagtgttaggcccaaattaaaaagcaaacttacgaacaactcagatgactatcttatgatgttatattaccacataattaaaattaatgaaattataacaaaccaaagtttattgattttttaaaatttagtgacgaattcgcaaggaaagttcttctaattgtttatcagaaacttcaccaggcgcattcgttaataaacatgtagcagatgctgttttagggaatgcgattgtatctctcaagtttgttctattagtcaataacatgactaatcggtctaatcctaatgcaataccgccatgaggtggtgcaccatatttaaatgcatctagtaagaagccgaattgttcctgtgcttgttctttagtaaatccaagaacttcgaacattttttcttgtaactcaccgtcatgaattctgattgaaccgccacctaattcataaccatttaatactatgtcataagcatttgcctcagcttcttctggcgcagtgccaagcttagcaatatcagcttcttttggagatgtaaacggatgatgtgctgcaacgtaacgtttcgcatcttcatcatattctaataatggccaatctgtcacccataagaagtttaattttgtttcatcgattaaacctaattctttagctaatttgacacgtaatgcacctaaactttgtgcaacgacatttggtttgtctgcaacaaacattactaagtcaccagcttcagcaccagttaatgtaagtaatgtttcaacattttctgtttcaaagaaacgtccaattggacctgtcaaaccatcttccacaactttaacccacgctaatcctttagcaccatagatgtttacaaattctgttaaagcatccatatctttacgtgtatattgttcagctgcacctttagcgacaattgctttaatttcaccatcattttcaacagtatctttaaatactttaaagtccatatcacgtcctaattgagaaacgtcaattaattccatttcaaaacgcgtatctggtttatcagaaccatagcgacgcatcgcttctttatatgtcatgcgtgggaacgcgtcattaatttcaacgcctttaacttctttaaccacttttttaagcatttcttcacccatttgcatcacatcttcttgatctacaaaactcatttcaatatcgacttgtgtgaattcaggttgacgatctgcacgtaaatcttcgtcacggaagcattttacgatttggtagtatttgtcaaatccgctaatcatcaataattgcttaaataattgtggcgattgtggtaatgcataaaattcaccatcatgaacacgagatggtactaaatagtcacgtgcaccctcaggtgttgacttcgttagtactggtgtttcgatgtcaaagaacccttcatcatccaaatattgacgaatagaacgagtaatttgatgtctcattttaaatgtttgcgctaactcttgacgacgtaaatctaaataacggtattttaatcgaatattttcatcaacgttaacattttcttcatttatagaaaatggtggtgtctcagatttattaatcactttaatatttgtaacttgtacttcaacttggccagttttaattttagggttaactgtttcagggtcacgcttcgtaactgtaccttgaacttctacaacatattcagaacgtactgtttcagcaattttcaatgcctcttctgaaaatgcaggattaaacacgacttgtacaattccttctctatctcttaaatcaacgaaaatcaatccacctaggtcacgacgattgttaacccatccttttaatgtaatttcttgtcctaaaaatgcctcagtaactaatccacaataagttgttcttttactcatattttaacgccctctctacttcttaaaatattcgactaatgcgtctaattctattgtttcagattcaccagttgtcatatttttaacatcgattttattattttctaattcttgatcaccaataacgattgtaaacttggcacctaaacggtctgcttgtttcatttgtcctttaattttacgctgtaagtagtctttatctgctttaataccattatgtctcaaatgatttaataacttcacagcatatcgatctgcttgatcacccattgtaacaatgaataaatctaagttttcttcaatatctaattcgataccttcttcttcaagtgcaagcaataatcgctctatacttagcgcaaaaccaatacctgtttcacttggaccatctagcaattctaataaaccattataacggccaccaccacaaagagttgtaatggcaccatcatagttagggttatccatcattaattcaaatgctgtatgtgtataataatccaatccacgaactaagttaggatcttcaatatatggaatacctaaatcatctaaataagcttttacttgttcataatatgccttagattcctcatttaagaaatcagtgattctaggtgcagtcttaatcgcttctttatcacggtcaactttacaatccaaaattcgcatcggatttgtatgcaaacgtgattgacaatctgaacaaaattcatgaattactggttcaaagtgtttcactaacgcttcgttatattcttttcgagacgccatatcccctacactattaataacaagctttaaatgttttaatccaaatgattgataaatatgcataaccatagctaatacttctgcatctacgctaggattttcagcaccaatagcttctacaccaaattgattaaattgacgatagcgccctttttgcttacgttcatatctaaacatcggtccattgtaataaagtttaattggttggtttggattaccttgcattttatgttcaatatatgaacgcacaactgcagctgttccctcaggtcttaatgtaatacttctatcgcctttatctttaaatgtatacatttctttttgtacgacatcggttgaatcaccaacacctcttgcaaaaagatctgtactttcaaaaattggtgttcttatttctttataattgtaaaatgtcattaattcatctaattgattttcaatgtaacgccatttctttgaatcttcaggtaaaatatcctgcgtccctctaggtattttaatcattttgacatctccctcggcaaactattttatttaattacctttttaaaactaaaactatatacgaccacttaactttgcacgataaatcataattttaaaagcaaaagaaaaagcccttgcacagcctgaaactgcacaagggacgaatatccgtgttgccaccctcattggtttaaaaaacatgcctaattgtaatcatcattactttttacaagcgtgcatttaataaacccactcaaaacgtttaacgtacgtttaacggctttacttttcataaagcacctcttcttgtgttcaatgtatataaactactcagcataatctttcagtctatggattatattcctacacaatcttagttagattgctacctatttcatttaccatttcaagaatactaacggttttagttataaaattcaatatcaatgataactactttcacatatttttgcaagccctacgcagaaaaataaattttaaggccatcaacaattgcttgttctaaaatttgtctatgtaattgatctttaatcatcgtttcatcagttgggttactaatataacctaattctaataaaacagcaggaacttttgtttgtcttaacacttgataattttcttgtcttgaaccgcgattagaaagtagacctttcttctgaatcgtagcgtctaacgtatctgctaaagctctttgattatcatgataccaataaactgtcattccatttgcattagatgattctaatgcatcattatgtatactcaaataagcatcgcctttgatatcacgattttctagtgaaacatatgtatcgtctgttcttgtcatcttaacagttgcgccttctttttctaaagtacgctgcaattcttttgctgttttcaacgtataatctttttctaaacttttatatttagtattgcttgaagcaccctggtcactacctccatgaccaggatcaagcactattgttttaccttgcaaaggatttttctccttcgtattatccgcgacaatatctaaatttgtgtgccatccagctatccaacctttttcattactggatgtatcttcaacttcaatccatttacctactttaccaatctttttaaaatggtcacctttttcaactttgtaaatgactggatacgcagcgtttggacctgtacgtaattcagcattttcagttattgtgatgttcccactatcttcactattgctattcagcaataaaaataaaaagatgataaataagacaaaggcaatcactactattagagtacgtttatttttaagaccctttttagataaccatgcctctatttttttcattgaattttgccgtcctgactttcataaataatagtgactggaccatcattatttatgttaacattcatgtgtgttccaaattcacctgttttcacagtaagaccatacgctcgtaacgcatcattaaaatactcatatatttttactgcttgatcaggatttttagaatttgagaaacctggacggttacctttttttacatctgcatagagagtaaattgtgaaactgatagtatttcaccattcatttgttggatattaaagtttaatttattattgtcatcttcaaataatcttgcattagcaattttctttgcaattacatctgcatcttgctctgtagagtcctgaccgataccgactaataaacaatatccttttttgatttgattatttaatgtatcattcgtcaccgatgcttctttaactctttgtacaactactttcatattttgcacctctagttccaaactcttgttactgtataaacatcaccaagttgtttgatcttttctaccacacgataaacatcattcacgtttttcaccatgacactaatatttattattgcatttttatcaatatctgatcgtcctgaaactttaattaaattaccggctgtcgagctaacagcttgtagtacttcattcaataagccatttcgatcatacgcagttacctctaaatcaacctgatatttttgagttgcgtcttttgattttacccattcaacattaattagtcgttcagtttcgttcttaatatttgggcaatcagtgcgatgtactttaataccgtgacctttggtgatataacctacaatatcatcacctggtataggattacaacattttgacaacttgataagcacattttctaaaccttctacatagacaccactatcagtaatgatgttgtctttaataggcaatgatttcgtaacttcttgtgcttcatttaaagcacgttgtttatctaaaatacgttgtctttcagttaatttattaacaatctgtaaggatgtcacgccgccaaatcctacagctgcgaataaatcatcttcatttgcaaagttatatttttcattaacaacctgaatatttttctctgtcaaaatatcttcgactctaaatccttgctcttttatttcagcttcaaccatcattcgtcctttttcaatgttagatgaacgatcttgttttttgaagaaacttttaattttacctttggcactagacgatttaacaattttcaaccaatcacgacttggtccatatgaatgtttactagtacgtatttcaacaatatcgcctgtttgtaaaatatagtcaattggtacaattttgccattcaccttggcaccaatcatcttattacctacttcactgtgaatcgcataagcaaaatcaatcggcacagcaccatatggcaactcaataacatcactcgctggggtaaatgcatatactttgtcactctgtaagtcatattttaaggtttccataaattcttgagcgtcagacgaagtatgatccgcttcagctaactcttttaaccaatttaacttattttgataagtttgatctttttcacttacttttttaccttctttgtaagcccagtgtgctgcaacaccatgttcagcaatttcgtgcatatcaaacgttcgtatttggatttcgagcgggtctccatttggacctactactgtagtatgcaatgactgatacaaattttgtttaggcattgcaatataatctttaaaacgtcctggcatcggtttccataacgtatgcaccaacccaagtatcgcataacaatcattaatagaattgacaataacacgtatcgccaacaaatcaaaaatttgatcaaattgctttttctgcttcatcattttccgataaatactgtaaatatgtttaggtctaccatttatatcgccttcgatattcattcggtccatttcggtacgtattctatcaatagccgtttcgatatacgcttcccgttcactacgtttcttcttcattaaattgactattctaaaatattgtacattatcaatataacgaagagccgtatcttctagttcccatttgattgtattaataccaagacgatgtgctaaaggtgcataaatttctaatgtttctcgagaaattctaatttgcttttcacgcggcatggctttcaaggtacgcatattatgtaatctgtctgctaatttcaccaaaattacgcgtacatctttggcaatcgcaataaataacttgcgatgattttcagcttgttgttcttcttttgagcggtattttacttttttaagctttgtcacaccatcaacaattcgagcaacttcttcattgaacatttcttttacatcttcaaatgtatacggtgtatcttcaattacatcatgcaaaaaacctgcgacaatcgtcggtccgtctaatcgcatttctgttaaaatacctgcaacttgtataggatgcataatgtatggtaatccgttttttcggaactgacctttatgtgcttcataagcaatatgatagctttttaaaacatactcatattcatctgctgacaaatatgattttgctttgtgaagaacttcgtctgcactatatggatattcgttgttcattatatgatacaccccattcatatttattacttcgccttaaacaatgatttaggtactcttgttgaatagtatttgtcccacaccaatcatacgtccgtcgacgataaatatttatcctgtcgtcattaatcgtaatattaattttacttgagcgagtttaatttgtatactattcctacttttaaaacttttacaaaaattcgacctaaatctactgtttcattttttaaatattagttctatgatactacaatttatgaaataaataaacgatgttattaaggtataatgctcaatcatctaacattttcagtaaataaaaaatcctaacatctcatgttaagaaaacttaaacaacttttttaattaagtcattggttcttatacatttgatgaaggatttcatttgataaaattatattatttattattcgtcatatgagattaaactcataacatcgtaatctttaattttttcaataccatttaaatatttcaattcaattataaatgcaatacctactacgataccgcctaatttttcgactaattttattgctgcttcaatcgtaccaccagtagctaataaatcatctgtaattaacacacgttgacctggtttaattgcatctttgtgcattgttaaaacatttgtaccatattctaggtcatactcataacgaatgacttcacgaggtaatttcccttcttttctaacaggtgcaaagccaatccccattgaataagctacaggacagccaatgataaagccacgcgcttcaggtcctacaacgatatcaacatctctgtcttttgcgtattctacaattttatctgttgcatagccatatgcttcaccattatccataattgtagtaatatccttgaaactaacacctggtttcggccaatcttgaacttctgatacgtattgctttaaatccattaatatttcctcctaaattgctcacgacaattgtgactttatccaattttttatttctgaaaaatcttgatataataattgcttttcaacatccatacgttgttgtcttaattgatatactttgctggaatcaatcgatcttttatcaggttgttgattgattcgaattaaaccatcttcttgtgttacaaattttaagtctaagaaaactttcaacatgaatttaagtgtatctggtttcacacttaaatgttcacacaataacataccctctttctggatatttgtttcttgtttagttattaatgctttataacactttttaaaaatatccatattaggtataccatcgaagtaaatcgaatgattatgttgcaaaactatataaagttgagaaaattgcagttgttgcaaggaattagacaagtcttccattgacattggtaaatctcttaatactactttatcagtttgttgtttaatttcttcaccataataatattcattcgcatttactttatcacttttaggatgaataagcacgacaatattttcatcattttctgtaaaaggtaaactttttctcttacttctataatctaatatttgctgttcattcatcgcaatatcttgaataattatttgcggtgattgattaccattccattcgttgatttgaacagatcctaatatattaattggctgttcatcttgtaactcaggttctaagtgtccattttgccaaaatagcgcggcgatattactttcaccaagtgtcaattttagatgatttttttgttgacctatcgccttaactgaagaaactgataaatcatccatttcaaaaataggtctagaaaaatctgttccgaagggtcttaaacgattcatatcacgaatatttttaatcgttatatcattttctgttaataatacatctactggctttacgggatctaacgaagttgttttagataattctttcatccatttatttaaaccttcagctaacgattctatattttcaatatccatcgtcatacctgcagccatatgatggccgccaaatttagcgattaactcttgatgtgctgatagtatttcaaacatcgacacttgatcaattgatctggcggaaccttttgcatgattttgctccctatcaatatttaaaattaatgttggcaaagcaaatgtttcgacaattttcgaagcaacaatacctaagacaccttcatgccaattttcttttgctaaaagtaaaaataaatctccatttttaactttcgtttctgccatagccattgcttcttctgtgatagttgctacaatatcttttctttcacggttaaaatgttcaacttgttctgctaaaaatgcagcttcttcttcgtcgtcagtcatcaacaattcgcaagctaatgatgcgtcatctaaacgacctacagcattaagtctaggtccaataataaaaccaattgtttcttcatcaatattgtcattgtatcccgcttcttttagcaatgctttaacagaggtcggacattgatcatttaagacttttaatccttgtttcactaatgatcgattttcatcagttaaggatactaagtccgcaatggtacctatcgcaactaatgctttaaaataatcaggtacattttcaatcaatgcttgtgctaatttgtacgcaacacctgcaccacacaattgttggaacggataattaaacgatggatgcattggatgtacgattgcatatgcttctggtaatatactaccaatttcatgatgatcagttacaatgacatcaactcctaaatcttgaaccattttaatttcattatgaccttgtatgccattatcaacagttatgattaatgttatgccttcatcatgagcatttctaaatgctagttcgtttggtccatatccttcggtaaagcggttaggaatatgccatcctacttgtgcacctaaaagttgtaatgttgtcactaaaattgtagttgaggtaacaccgtcggcatcgtaatcaccataaactaggattttctcatcattcgctatcgctcttttaattctatcaatagccttagtcatatcgctcaattgcaatgcatcatgattgacatctgtgtctgaaatgatggattcaattgcttgttcatcaataatcgatttactttctaatattttttttacgattggcgttaactttaattttgatgttaattcatcacttatgtattcagctggtttagttaatttccacttatacttcggtttaatcatatatatttacgcctcatttccaaaagacattatatctaaaattactttaaataaaaagcacttatctaaataatcaagactttaattataccattttttaaaaatgaatgcgggaacttatttatatatattttgttaaatttaaataaagtaaaaagcggtatgtaaactctttaatgtttcacataccgcttaattcattttaaactaaaatcttttcatcgttcgatttcttttctttatatacaactaatttgtgtttcggcgattttttcaactgacgttttttcattattccccatagcggaacggcaatgaagattgaagagaatacaccagaaatcaatccgataaataatgctaaagtaaagttgaatatcgtaggagcaccgaagaatagtatagcaactactactacaataactgttaatactgtattaattgaacgtgtcatcgtctgtctaattgatctattaacgatatcatcaatttgttctgttgtcgtaatcactttaaccttttgtaagttttcacgtacacggtcaaacgttacgattgtatcattaattgaataaccgacaattgttaatacagcggcgataaatgttaaatctacttcaattctaaataaactgaaaatcgctactataatgaatacatcatgtaataatgccaatacagatgaaagacccatgcgccattcaaatcgtaatgatacatagatgatgatacctatcgatgcatagattaatgcaagcattgcattttttgctaattcctgtccaataattggtgatacagtgttaatttgaggtgtgtcaccgaatttcgatttaatattatcactcaatttattatcttgagcacgcgttaaatcgtctttaaattgaacagttgctactttattatctttaccattgatttgaatttgatccgctttaagtccactatcttttacaacttgctcaaccttttgttgagtaattgcttgtttagattggaaatctacacgtgtaccacttgagaaatcaattcctaggtttaacttgaagatataaagaataactaaaccgacaactacaattaaaatacttactccaattaatggcttagctaatttaacaaaattccatttctcgaatgaagttttaaggtcatgaacatctacaccttcattaatatcatgtcgtttattctttttaacaccaaataaccaatattgatttttgaatatatttgatgaaacaagtaatgataataagaatcttgataagaacacggctgtaacaaagatcattagaatacctaataataacattgtcgcgaaacctttaactgaactttcaccgaagaagaataatactgctgcggcgataactgttgttaagttagaatcaaaaattgttaggaacgaacttttgtttgctttagaaaaggcttgctttatcgttctacctattcgaagttcatccttaatacgctcatacatgataatattggcatctacagccatacctacacctaataccaacgccgctaatcctggtaaagttagaaccccggaaatgaaattaaatgctactaaagttagatagatataagttgtcaatgcaataatcgctactaaaccaggtaagcggtagaatccaagcatgaataaataaattaatgctacaccaataaacgatgcaaacacagttttatctaatgcatcttgaccaaattgggcacctactgagtttgaataaatttctttcaagtcaactggtaaagaacctgcatttaacaattcggcgatttgttttgcttttttaacgccttcttgtcctttaaatccaccagagatttctacgctatcagaattgattggttgatcaacacttgctgcagaaataaattttgggtttttcttttgtgcttcttttttatagctgtcaccttttttgaaatctaaccaaacaaccatgacattatcacgtttcttagagatttcttccgttacttttttaaatttgtttttgtcttttactttaaaagtaactgtcggctggtttgtttcctgtttaaattcttgtttggcagatccctgtttaatatcagaaccgcttaattttactttatcttctgcatcgcgaattgttaaattagcttgagaagataaaattttacgtgcttcattctggtctgttacaccagcaagttgaactctaattctattaggttcttcaacttgaattttaggttcggaaacacctaaaacgttaacacgattttctaatgtttgcgctgttgattgtaaggcttttttatctattttgtcgcctttatttaaagggtcgacttgataaagtacctcaaatccaccttgcaaatcaagtcctaaattgacattctttataacacttttataagttgcagccattccggcaaacaacaatacgactaaaagcaagaacgcaattattctactacttttcttcacatgaacacctcattatttacgtatgtatttagaatacttgaatactattttataacgcaagttaaatctttcttacaaaatttattagccttatacatattaacatactagagcagggagtaaaaatggtcatagatatatttaatttaaatttaacaattattatgtatcacaatttctttttttggaataaaaataagctattctacattctacttataacttaaaaaggatgaaacgctattcgtttcatcctttttaataccacttcttgttatgaagggtcaacttgtttaatagcaggtttttcgaaagttaattcagtaccatgaccattaactgtaataacaacagttgtttcatctactgctttaacagtacctttaataccaccaatagttgtaattctttgaccagattgaatgttattaatcaactcacgatgctgtttcgcacgtttttgttgtggtctgatcatcaagaaatacataaccgcaaaaattacgactatatatattagtaatgaaaattgcattttatacgctcctcttgcttaaaagttttttgggttctcaacatttaatccatattgctcgaagaattcttctttgaaatctaaaagacgatcttctcgaatggcttgtcttatatcttccattaattttagcagaaaatgtaaattatgaatagtagtaagacgaataccaaaagtttcctctgccttgattaaatgacgtatatacgctcttgagtagttttgacatgtataacagtcacaattctcatctaacggtcttaaatcatctgcaaattttgcatttttaataactaaacgaccttgcgatgtcatacaagtaccatttctggcaatacgtgtcggtaagacacaatcaaacatatccatgccgcgaatactacattcgattaacgcatctggagatcctacacccattaaatatcttggtttatctttaggcataaactgctctgtatgttcaaccattttatacataaccggtttaggttcaccaactgacaaaccgccgattgcataaccaggaaaatctaattctactaaatcctttgcactttgttctcttaaatcttcatattcgccaccttgtataatgccgaacaatgcttgatcttcaggtctttggtgtgcatctagacatcttttcgcccaacgtgttgtacgttcaatagatttttttacataatcatattcagcaggcatcggtggacattcatcaaatgccatcataatatcagaacctaaatcattttgaatttgcattgatttctcaggactcaaaaataatttagacccattagtatgatgtctaaattccacgccttcttctgtaattttacgtaaattacttaaactaaacacttggaaaccgcctgaatctgttagaatcggaccatcccaattcatgaatttatgtaatcccccagcgtgtttgataatatcatttccgggttgtaaccacaaatgatatgtgttgcccaaaatgatttttgcttcaatttgtcttaactcttctggactcattgttttaacggttgctttagtaccaactggcataaacataggtgtttcaaatgaaccgtgtggtgtgtgcacgatacctaaacgcgcacctgattgtttacaagttttaatgtgttcgtatgttactgcaggcatattcaaaatcctcacattctttttaaataattaacattgcatcgccaaaactaaagaatctatattctaaatttactgccgttttataagcattcagaacattttcacgattactaaacgctgatactagcataactaatgttgattttggtaaatgaaaattagtaatctggccatcaatagctttaaaatcaaatcctggataaataaatatattagtccagccactcgtttcaacaaatttatcatgatcgcgtcgaattgtttcaagtgtacgtgttgaagttgtaccaactgatataatgcgatgtcctttggacttagtatcatttaataaatcagctgtttcttgtgtcatttgataatattcactatgcatttcgtggtcattcacatcgtcgacgctcaccggtctaaacgtacctaatccaacatgtaatgtaacaaatgcgatattaacacctttatttttaatttcagttaataactcatcagtaaaatgtaatccagctgttggtgctgccgctgaaccactttctttagcgtaaactgtttgataacgatctggatcatctaaacgttctttgatgtatggtggcagtggcatttcccctaattcatctaatctttcttgtaaaataccttcataatgtaaacgcatgatacgtccaccttggtccatttcttttatgcattcagctataattttgccattaccaaaattcaatttattaccaactttaatacgcttagctggtttcagtaagacttcccaatcattaccttcaatttgagttagcattaacatttcaacttttgcaccagtttcttcttttaaaccaaaaagtctagctggcattactcgcgtatcgttaagcactaatgtatcaccaggtctaaaatattcaatgatatctttgaaatgtaaatgtttcatttcaccagtttctctatccatgactaataaacgactatgatcacgatcttttaaaggcgtttgagcaattaatgattctggtaagtcatagtcaaattcttcaatattcacgttattctctctcctcattcgactttgcaaaatgttcataagctaatggtgttgcttttctgccacgtggcgtacgttctaaaaagcctttctgaataagaaatggctcataaacgtcctcaattgtaatacgttcttcgccaattgttacggcaatcgcatctaaaccaacaggtccaccattatactgcttaataatacagttcatcattttatgatcaatgtaatctagtccgtgttgatcaacttgaagtaaacctaatgcgtgctttgttgtttcaatgtatatttgttcatcttcattcacttgctggaagtctcttacccgtttcaatagtcgattggctactcttggagtccctctagaacgtttagctagttcaatggcactttcttcatcaatacctgtgcctaaaacctcagctgttctaataatgatttcttttaaatctgattcattataatattctaatcttaagtgcacaccaaatcgatcccttagtggacctgttaagctaccagctcgagttgttgcacctaccaaagtgaatggaggtaagtcgatacggatacttctagcctcatcgcctttaccaatgataatatctaaaaagaaatcttccattgcagggtataacacttcttcaacaacactactcagtctgtgtatttcatcaataaacaaaacatctccaggttgaagtcctgataaaattgcagccaaatcaccaggtctttctaatgaaggccctgatactgtacgtatatttacttccatttcattggcaataatattagataatgttgtcttacctaatccaggggggccaaaaagcaatacatgatctaatggttcatgacgaagtttagccgctttaataaatacttctaaattactttttattgaattttgaccaatatattgtcgtaatctcgtaggtctaagcgacaattcgaaatcagtttcttcactatgcattgattgatcaaccatacgctcattcatgacaacacttcccctattaatctatttaaaattaagatacaactaattgaagacctgccttaacagcttcatcaactgagtcatatttatttttatttaacgttttctcaacttttgcaagctctcgtttagaataacctaatgcttctaacgctaacattgcttcttgcacgaattgatcttgcaccgtcgatgtagcgtctacttgtaataatgaatcgctatcttcttcagtgattttcactttaccttttaaatctaaaacaatctgtcttgccgttttcttaccaattcctgggaatttagttaaatacgtatcattttcattttcaatggcacgctttacttcattaggcgtacttgtcgctaaaatagctaaagctgatttcggaccaataccagtaactttaattaaactcaagaacatatctttctcttcttcactactaaatccatacaataattgtgcatcttcacgaacaattaaagatgtatgaattaaaacttcatgatctagatgcttttgaaaacgataagaatttggtgtttgaatttcataaccaacaccagcagtttcaacaactacgtgtgtaggatataaatgtgttaacttacctttgacatacgcgtacattataggcacatccttacatactcatactaattaattctacttttgatacataatctaaatttctcaaagcgccaataacatcctccactgaagtttctttagatttagcattcagtgataatgttattgttgctttttcttccattggaatactttgatgaatcgttaatacagatagttctaactttgatataacatctagtacacgtgccaacatacccacaatatcagttacatataaaattaatgtaaattctcgatggtcaagcattttatcgtctactggaaatatcgtttctctatatttataaaaagcacttctagatagatcaaactgtttaacggcatcataaatggacaatgtcggatcacttttcaaggcatctttaatcttcaatgttttaaccacggattcaggcaagacatcttctctaattaaataaaactttttataatctttattgtccatcatgttacgctcctattcaacgaattcaaattctccgccaagaattctaacgatatcaccatttttacaaccacgttctctaagcgcatcatcaatacccatcgaacgcatttgacgagcaaatcgacgtactgctggatcactgttaaagtcagtcattttaaacattctttcaatagcattaccacttaccacataagcaccatcatcatctcttgaaattgtaaatttatcttgtgacggtgtatgtttatataatactcggttaatgccaaccgactcctcttcttcaactgtgaagtcaacatctttatattcttctaatttatctgctattgcatataataattgatcaatattatcacgcgttattgttgaaactggaataactggcacatcttcgccaatttcttctttaaacaagattaaattatcttgtgattcaggtaaatccatcttgttagctactacgatttgaggtctatcttctaaacgttgctcgtacgcggctaattcttgattaatgactttataatcttcaataggttctctaccttcagaaccactcatatcaatcatgtgaacaataacttttgttctctctacatgtcttaaaaattgatgtcctaatccaacgccatcagatgcaccttcaattaaacctggtaaatctgccataacaaaacttcgttgatcaggtgttgaaacaacacctaggtttggtttaatcgttgtaaaatgatatgccccaattttaggcttagcttttgaaacgatagataataaagtcgatttacccacactagggaaacctactaatcctacatcagctaataatttcaattctaaagatacatctaattcctcacctggttcacctttttcactgaagtcaggtgcagggtttctaggtgttgcaaaacgtgaattacctcgtccacctcgaccgcccttcgctactacagctctttgaccatcttcaacaagatctgctaacacttcgtctgtatcaacatttttaataattgtaccaggtggaacttttaatactaaatcttccgcatttttaccatgcatattactactttggccattttcacctttgcttgctttaaaatgacgttgatatctaaaatctaataacgttcttaaaccttcatccacttcaaatacgactgaagcacctttaccaccgtcaccgccagctggtccaccaaatggtacatatttttctcttctgtatgcggtaataccattaccaccatcaccggctttaagagatattttgacttgatcgacaaacatatatctcacctcttttacatataattttcattttcccaataattatagcatattagagccccttatatattgtaaataattaggggctcttatgcagttgcttttataaatctttgctttaaaatacttatatttctcagcaccaattgtggtacagtttattctttaaacgctgcaactgtaatccttttagccccttatatattgtaaataattaggggctcttatgcagttgcttttaagtttactttactcaaattgctgatatttccaagtaccaaattcgatactttttgctttttatactgcaactgtaatcctttgtccccttatagtttagcgattaggggctcttatgcagttgcacatttagtataacgtctataattcccattttttaataacaaaatgaaaataataatgaaaaacgttttataaaaagtaaaaaacaccagaagattcacttctggtgttaactagacaaaattattcagctactgcatatacagaaacttgttttttgtcgcgacctttacgttcgaatttaacaacgccgtcgattttagcgaataatgtatcatcgccaccacgacctacattttcaccagggtaaattttagtaccacgttggcgatataaaattgaaccacctgttacgaattgaccgtcagcacgtttagcacctaagcgttttgattcagagtcacgtccgttttttgtagaacttaccccttttttagatgcgaagaattgtaagtttaattttaacatcggaatgcacctcacttataatttaatctaatattctcattatattcttcttcaatagtttgtaaagacacaagcattgtttgaagaattagttgcgcttcatcgttatttgtatcaacgcttcttatatgaaaatgaccaccattgtcgtcataattgatatctggtctctcagatgtcaatcctataatcgcattaacactaccaaacaatacagctgaagctccagcacaaacgatatcatgaccatattcaccatggtcagcatggccatccataataacgtctgttactttgccttcatcattaactgtaatatcaacagtaatcataataattacgcgttgattttatcgattgttaatttagtgtatggttgacgatggccttttttacgttttgaatttttacgacgtttgtatgtgaatacagtgatttttttaccgcgaccttgtttattaacagtagcagtaactgttgcaccttcaactgttggcgctccaactttaactgaatctccacctacaaataatactttatcaaatgtaaaagtatctccttcgtttacgtctaatttttcaacgaagatttcttgaccttcttctactttgatttgttttccacctgtttcaataatagcaaacatactttgcacctcctgtataataagtcacgccatacataggtgacatttcgttattgagtcaagcgtttgcactctacgttgtttcggtcgcaactcgagtcatttataaagataaactcttctcgtttcttccttcaacgccttgattgacaatcgctttctttcaataacttctgcaaatgagtcaagcgtttgcactctacgttgtttcggtcgtaactcgagtcatttataaagataaactcttctcgtttcttccttcaacgccttgattgacaatcgctttctttcaataactcctgcaaatgagtcaagcgtttgcactctacgttgtttcggtcgcaactcgagtcatttatatagataaactctctcgtttcttccttcaacgccttgattgacaatcgctttcttcattaaaaatgttcttgaacctatatttgagcggttgtatgtagctacttataactactcaactattgcatcttaccattgacggcgtttcatgtcaatgtcattgtttgtttttttaaggaactttataatcaacggataaagcatgattagcagtacaaaattcataattaatgttggcaataatctaaagactacaaaatgaataatatcaaattgaatgaatcctaacataccgtatattaatgccacatagacttctaataataaggtgctggctaatataataatgaataacatcgaatgatctttgtaaaaaattttaaagaatcgatctataagtgctaaaaacaatatatagccaaataagtacactccataaatactaccaaagtatacatcagtcattacacctaaaaatatgctgagcaataatgatacgccaaagctacgatacactaccatcattaaaatatacataaatgtaaggtgtggtacaaatacaagttcaaacttacctatgtgcattggtataagaagcccaattgcagtatctatataaaatagtaaaatacctatcaaaaaataatacagtgtacgcattatttatccctgctttcatcatcaggaattgttttaggatctctttttgcaacataaacatggctcaaatctgttaagtctgcaccagtcttaaccctaacttctttagctaagccgtattgatcattttgaaccttagtcacttctccaatatataaattacttggtaattgatcagctaatccacttgtaacgactttatctccttttgagatattatctctattattaatatcactaattacaagttctgagttcttttcatcataacgatcaattaagccaaatatatttttagaaccgtgttgtatatttacagataatttacccgcacgtgtattagttgagattaaatcaacttgtgaagaaaatttattaactttagtaactcttccaacaaaaccttttgatgtcatcacagccatatttgaagttatacctgatttagatcccttatcaattacaattgtattcatccactgatccggatttcttgctaaaaccgtagtagaaataggatcaaattttgaaatatcttttaaatcaagctctttttttaatttttcattttccgcttctaattgttggttcttagattctaactggctaatcttatttttagcttctttagaatctccttttttaaaaaagtccccaatcgtaccagcaacaaaattaactggataactcacaactcgttgtccaaaagacacagaatcacctatatattgttcaggaggtgattgagattgtgaacgtatggacagcccaattaatgcaataaaaacgataattgcacataaaacaacaattaatttgttatttttaaaaaacttaagcacccagaacacctctattatgtcaaaatattgtatatccttttctattttatattactcccattatgaaataaagcactaactacgaattactttgaaaatgagcaactccgtaaaaatttgtggcattttaaaaacaaaaaactactagcaaacattctagtcactagtagtgtaaataatcgatttaaattttaaaattatctgtttgtatcgttcgaggattcactgttcgaattctgaagttgtctccaacgtgcgaataagttctgggccttttgttgttcattagcttgtttctgttttgattgttctgccatttgaactacaccaaccttttaaatttattctagtgacaggataactaaaatatatttcttatgcaataatttcctattgataagcattttcaggttttagttgtaaattttgccctaattcatttaagtcttgttgcatttcaaattcagtattgtaaacacgcattgactcatctccaaatttataaagaataaattcgtctcctctttgacctataatatattgatcattataagccatgcgattcattccagacacagccataaactcttgtttatctatcattttaaatacatttttaatttggcttaatggtacattctttattaaatcattttcttttaatgaatatttctcaccacttacataaacatgttgggcatcattagtgggttgcgtaacttgattcatttgatcattatcatgatttacaggattccaatcttgttcttttaaaaaaggtgcgtatttcaaggcgatataaacaattatcacaattgctattactgctataatgtttttaatcatactaaatatcaatctcatagttcgcctccaatgtcttcatctaattatatattttattatgtatattttcctcagtcttcagccttaatcatgatatatcttaggactgatgcacgttcatttaaaatagcttataattttgttatgatttaaaagcgtatgaggaggtttgtagcattgagtatactaacaattattttaatagcactattagtcatcctcctttttagagttggactttctattttgcgatttttaatttatgtcggacttgttttattatgtatttacttaggatatcaaggtttaatatggttgctcgatttttttcaaataaatagtgggtttttaccacactttcaatttaacaattaaatttattctgcataacaaaactccttatgtactagtttagaattttttaactagttccacattaggagttttaatttgtttccaagcacgtttactacttgatgaacagattactattacttacgcccaaatgcgttagataaaaatcgtatcagcgcgtagctaccacttagtaataggccccaaacgattccagtaaaaattgagcctattgctacacttaataaaggaaaagcttgtttcgtaacaatcacacctgctaatgccgttactaaaatacctaacgtagataaagctaatgttattaatagattgcgctttgttacaggttcatttttaatatttaactgcatggtataaaccattggcacgagaaccccgataataataaatagagtcactatttttcctccaatgaaagtacttcgtaggtattatacacaagatacgtcattaattctatcaacttcaatcattttcatcaaagtaacccgcttctacaagactcgtaaatctattatcaccgattataatatgatccaataaatctatccctaaaatcaaaccacactccttcaacctcattgttgttatgatatcttcttgtgagggcgtcgggtcatatcaagagtaatccataaaaaagccgattgtaataacctttacactttaaagacatgtccttaaagtgattcaattatctaaatttcttttctcgttaattaggttttggaactctttttctaattcctccgaaggttcaatactcaatcgactgagtatctcagtaatccttgtttcaagtaaaagttttttatcctcttttatatcccgtgtttcctccctagcttgtttagctttaaattggtcatatgttccttcaaatattttaatttctttattatcaatcatcatgattcgggtagctattttttcgataaacctacgatcatgggagacaaaaattacgcttccttcatactcctctaataaggattcaaacgcctctatagcctccatatcaagaaagtttgttggttcatctaatactaacgtattaacatcacttaagaacactttagttagtgctaccttaactcgctctccaccacttaagacatttactggtttatgaacatcatctctgaaaaaatgcattctcgctagaatggttcgaataagagtttcattttgccgtgaagaagattggacgttttctaaaatagtcttgtcgagctctaatatgtctagattctggctaaagtaaccaattttaacagatggtgaaaatgaaatacctggcttatcctgaacaatttttttaataaaggtggtcttgcccgtaccgttagagccgataattgccagcttatctcctcctcgaacgtaaaaactagctgctttccacaatactcgttcctcaattacacccgaaacatcttcaacacggagtataatccgatttttaaaagtctctgaattcaataaatccattttaagtgggggtagttcttttgttttttctaccttttcaagcttatccagtctagtttctagagcttttgccgttttccgtaatttcttctgtttatttgcgaagtatggcttcgttccttttagccttgcttccgatgaacttatatttttcggtttcttagtagctcgttgagctttctcttcttttaactttatggcctcttctaactgtttcttttctttttcatatttttcatgtgctaattgctcttggcgattttctaattctttctgctcaatatagtcactatagttccctttgtattcggttatacccccttctttgatttcccatatactcgtacaaagagtatctaagaaagcacgatcatgtgaaacgatgataaatgctccatgccagtcctttaattttcgctctaagttttctatataatttgtatcaaggttagttgtcggttcatctgctagtaacagttctgggtttttatcaagtgcttgctgaatatattttcgtgttacttcaccaccactttttgttgtttccatatgtttcaattgtggaatgagttcgcaccgtgaatactgagttacagtaccttcttcaggaaaaagcttttcatccaatatgtgaagtaacgttgtttttccactgccatttccaccaactaacccaattcggtcattctgataaatctgtaattgatccatgttcaacagtaaacgatcttgaacatagtgttttatacgaagagcctctaacaatattttcatattatcatccccttaaaaataatcggagacaataaatgcctcctaattcattcagaataggaggcataaatcaatatagatgtactctaaaaaagactcttttagagccaactacagaaatttaatcctatcctgaagatcacaattgaaggcagcacaaataaaacatcatttgtaaatcaaacaccttcgattgtttactttcaaaaataggattagttaatcatgtagttggttcaccctttccttcgtctaattaaatttaccttaaacaaatgacggggaaatgtcaaatgtttaagtcagagtattctttctagtctttaaaataaagctcaccatataatttctgaacttgatttttcaattgaccattttcttcctctaattcttttatcctcgcttttagcgttttgataagtatttcttctgattttttatttttctttataggcgtagagttcaatctttttccattgagttggcgatgtcggatattttcaatttgttttcttatatcactttctttatacaaccaagatttcgagacttttgcttctgcagctactgtattaaaatttatagttttgccttctaatgacatttttgaaattatcttttctacatttagtctagtattgtgacttttttcttttgccagttgaataatcttatcagtattccttgattgtttccccatttactccgtctcctttaagctgcctattatctgctctagtcgctcttgtacacgagaattggtttcaatctgtcgttgccattgtttctcttttgcgatagctaataattccttagtatgagctaagtgatctttatgttgcgataagaactttttgcttgtacagaagtgtgtgcagtctaaacaagcattggcgtgaggacaaggaccagcgattatcgggagtcgacaatagccattgggcaatacctgagcgttaatgttcttcttgaaccattgaagatcagttttattggcttcttcggattcttctatgtcaataatgctgccctgatttgtcacaagcgtctctttgaatttagagaactcttcctttaatgtttcatcgaaaatgtgggcatatctgctcgtcatttccgggctttcatgtcctaaaaatttctggacaatatgttgaggaatgccattattaatcattcttgtaccaacggtatgccgaaatgcgtgtgcgtggaatctaaaaacgcttcctgctcgatccacgatatttttcttatgtgccagctcgtttagttcccgtctaaaagtatcctgtttcagtggagagccatctttacgaggaaagaggtattcacatccaccaaactcctctgacacatgcttttcatgtgccttaataagaccagctacctctctcgatatcggaatagtatgttcttttttcattttccattggtaatattttaaaaagtaatcaccttccttatcttcgagaaggcaatctcttttcaaagtacacaactcactgattctcataccaccttcttgaatgatcattaccatagttgctatataagcaggtaaatcatctaaatgactgtttaattgctccaaaacgtattcatcaatatatctcggtgttgctttcggtaccttaggataatcttcttggaaaactagtatctttgaaggaacgtcattccaatcaaacttctgaattgtagtaaagaaaccgtccaaaaccgatattttccccattaaagtgctcggtttaattcctgatttattcagttctgccaagtagtgttcaatttgctctcgggtaagctgatgaagtcttgttaaatgtttataatttttattaagaaatacaaaaaactctttcaacctgcctgcgatatcgcttacatgagaaaagctcacggtgtttaatttgagcttgcaatatcgttttgtcagctctctgtaataaatactaggaatctctttgaaagatacgagatactcatattgagtgggattgactttatcagaaggtagattcatttttcttctatcccaaacatccttttcccattcttctccgtcaaaataataatcttcataaaactccataaactgcttaagatttgtcacatagtatgaatttgcctttactgtgattctttcttgtttggcatttagcttgtgattggtagttgttattctgactccttgctctactaagtaagtcctgtattcagtcatagctttttcaattggtacttctgtgattgactctatgtgaggatatttcatatctaagaaacccaacattttattaattacagttccttttctaatccacacggttttagcattccaaacctcattggtcatgtggtaatagaaaaagaatttcaattcggttcttaaccacaaattttcaactcggtcaaaatttacccatcggtttcttaaagatgggcttttagaaagttcgattgctgaaggtagtgggcactttctgatatcccatctatcatcagcccaatatccttctaatttgctgttcatttctgctatttttttaccaattgctacagagcttataatttttcttttggtattcatcgtcatttatctctcccttcaagatactttttaaattcttctttcatatcttggttagagaggtggacgtatgtgtttaaagtggtctgaacctgtgcgtgtcctaatcttttttggacgtaagcagcatcccaaccatttctaatcagttctgtcgcatgggtatggcgtaacgtatgaggtgtaaacacaatacctgttcttttattcaaccgccgaacgagatcgagtacactttgatattttaaaggctgcccaaaatgcgattcttttaatgctataaatacataatcatgctctaattcatcgtagtattcatgcacaagatagtctgtatagagagccattaactctttgctaacatggattactctttcttttctaagctttatgtaagctccattcagactttcttctctaggtgttatgtgaacctgattatcccaagtcactatgtctgccagtcttagagacaaaacctctcctattcgcatcccaccttcatacataagcattatgattaatttatctctgagggtgtgacaggcttctacgatttcttttacctctgaatgatttagtgtcctaatcattttctttttttcccttaacttcaatacgtttcttttatatggctttcctttactcacatgatggagaaatcctttgtagtttctgcctcgtgtttcattgaacaaatcaagcattttaaagccaccagaacgactcaaatattctagataactaatcacggcattaagaatagcattaacagtagattcctctcttttagcttcttttgggtgaatgtcaataacattcgcgttttctgtggggttacgtaaccatcctacaaaattcgccaactcgtcaaactgaatttcgtctaacgagatttttctttgctgcataaacacataaaataactttaggtggtaacaatatgtttttatagtgttgggtgacttattagtattatctagatatttaatgaagctcataaccggttcaactacttcaaattgttcatcaagcaatataaatagtggataagctttattatccactactattttttgcactttcatttttcctcccccactttgaatactttatatactttatatttctcctattgatataatgtactcaaagtagtatatcatccattatactttctttaaatactttaagtactatagattagtatactacgtttaatacatcaccggatggatgattatgaactgcgatgattgcattggcattttctctcaccgcaatactaaaaatttcacgtggatgtacaatcgaactatttaatgtacctttaaaaacacaggtttctttaatcactacattttttgaatttaacaataaaatgacaaaatgttcttgtgttaaatctttcattgttggaatcatataatcagcaacatcacttggttgcgttatttttatacgattattttcagctcttctccccatcctttcccctaactcaaatgccgcttttaatgtaattgctttttgtaatccaatccctttaacttgtatcaaatcgttaattgaagattttttcaattcattcagattcgatgcagatttaagcagttcattactaatgtcaatactcgagaatccttttcttccggtgttaattaatatagctaataattctgtattcgaaagactttttgcaccatggcttaacaaacgttctcttggcatttctgaagttaccatttctttaattttcaaaaatatacgcctcctaaaaattgatggatatcattataaaaaagtgaattgataaaaaaggaaataaatataaatggaacaaggggtaatagtttaatcggcttaaatatcaaggtaattaaagcaactaaaccagcaatgacaaatgtaaatataatgacataaatagtgaattggagagggaaaaacaaagaaagtgcagatattagtaaaacgtcaccataaccaatatatgcccgaaataaaaagtagaatatatgcgtggtcatactaataatgataaaagctactggataaataatacttaacgagagagaaacgatacaataaattataattaagcgacaatctaacattaaagaagtgatatcggtcatagtaaatataagcagaaaaacatatgtagttataaaaagcgtagcatttacgtatgtgaaatcatacttaataaagacgataggtattaaagcaaaggtttccccaaagaaatgtgttagtgaaatacgcttatgacagtttcgacatctcccttttaataataaaaaactaataatcggcattaattcataccatttgagtgatgaattacaataatcacatttcgatcttctatgtaaataatcaaatgacgtttcttcaatagatataaattgatatagaaaactaaaaatacaactgcaaatataagataacaatactaccaaatgacaacctccttacgtaaattatagttacttattaccaaaatgtaaatatacaccattctccaaatattgaacctctttttcatttaaatttttcaatattactaagcataattgatggatactttaacagcccattactgttcggcaaatttaataatggcaagaaattaaaccttataaacacatacgatttagagcataaaaaataaccatgaagctacctattgattaaattgattcttcatggctattttagttttataatgcttcaaagtctaattttgatttaacttcacttatgaagtacagactaccggtaattactaatgtatcaccttgataattttttataaattctacgtagtcatctactaattgtatatcgtcattttcaatactacctacaatttcttctttgcgtaacgctttcggaaaatcaaattcagttgcataaaatgtatgcgcaattaaacttaaatatttgaccatctcgttaatcggttttccgtttattgctgagaacaaaatatctactttttctttatcatggtactgtttaattgtatcaattagagcatctatactctctgaattatgtgcgccatccaaaatgattaaaggtttgtcatgcacctgctcaatacgtccagtccaacgaactgattcaataccgtctatcatcttattgaaatctaattcaattaatccttgttcatttaattcaataagagctgttatggctaatgcagcattttgtttctgatgttcacctaacatacttaaaatgattgtttctaattcataatctttataacggtaagtaaattcatcattttgcgatacaacaacaatttctctatctaattcaattggctttgcatgttgttcaattgcgcgttcacgaacatactttaatgcatcttcatttttaacagcatatatcactggaacgttaggctttataatcgcgcctttatccctagcaatatctagataagtaccacctaaaatatctgtatggtctagaccgatactagttaagattgataaaatcggtgtaaagacatttgtcgaatcgttctttatacccaatccagcctcaacaatgacaaaatcaacaggatgtatttcaccaaaatataaaaacatcatcgctgtgattatttcgaattcagttgcaacacctaaatctgtttcacgttccatcatttcactaactggtttaatacgagatactaattctacaatagcgtcatttgatattggcacaccatttagactaattcgttcattaaatgtttcaataaacggcgacgtaaatgtacctacttcataaccattttcaactaaagctgttctaaggtaagcaactgtagagcctttaccattcgtgccacctacatgaatacccttaatgttattttgaggattattaaattgtgctagcatccattccatacgtttaacacctggtttgatgccaaatttagttctttcgtgtatccaatacaagctctctaggtaattcattgttactaactcctatgcttttaattgttcaattcttgccttcacaccatcatatttttcttgataatcttgttttttacgtttttcttcatttataaccttttcaggtgctttacttacaaagttttcattagagagctttttatctactctatctaattcgctttgaagtttagctaattctttttccaaacggctgatttccttatccatatcaattagcccttctaatggtaataccactttacctgcaattacaactgatgtcattgctttctcaggaatttccacgtcagtgcttatatttaacgtactaggattacagaatttgattaaataatctttgttttgtgataaagttgtttcaatttctttatctttagcttgaattaaaataggtatttctttagacaatggcgtatttacttctacacgtgattgtcttacagatttaatgatttcaacaagttgttgcattgtttgtttactttcttcaaaaaccaatgattcacgcacttctggccatgaagctttaacaattgtttcaccttgatgtggtaaactttgccatattttctctgttacaaatggcatgaatggatgtagcattctcataatattgtctaaagtataactcaatactgaacgggtaacttgtttttgttcttcatcattaccattcattggaattttactcatttcaatgtaccaatcacagaaatcatcccaaatgaaattatataatgctcgtccaacttcaccgaattcatatttgtcacttagatcagtaactgttgcaatcgtttcatttaaacgtgttagaatccatttatctgctaatgataagttaccacttaaatcgatatcttcaactttaaagtcttcaccgatattcattaaactgaaacgtgctccattccaaattttattgataaagttccacactgactcaactttttcagttgagtatcttaaatcatgtcctggagatgaacccgttgctaagaagtaacgcaagctatcagcaccgtattcgtcaataacatccattggatccacaccattacctaatgatttactcatcttacgcccgtcttcagcgcgaactaagccgtgtaataacacatcattaaatggacgacgatctgtaaattctaagccttggaatatcatacgtgctacccagaaaaagataatgtcgtaacctgtaactaagacatttgttgggtagtatcgtttaaagtcttcgctttctaaatcaggccaacctaacgtagagaaaggccataaagcacttgagaaccacgtatctaatacatcttcatcttgttgccaattttcaatatcagttggcgcttcttctccaacatatatttcgcctgtttctttatgataccaagccggaatttgatgaccccaccataattgtcttgaaatcgtccaatctctaatattttccatccattggttaaatgtatgttcgaaacgttgcggataaaaatcaatacgatcatctgttttttggttatctaatgaacgtttcgctaagtcttccatgcgcacaaaccattgcgttgataaatatggttcaacaacagcgccagatcgttctgaatgacctacagaatgaacatgatcttcaatcttgataactaaatcttgttcttttaaatcttcaactagctgtttacgacaatcaaaacggtccataccttcgtatttaccagctttgtcgttcattttaccattttcatccataacgataatattttctaattgatgtctttgaccaatttcaaaatcattagggtcatgtgctggtgtcactttcatagcaccagaaccgaagtctatatcgacatactcatctgctaaaataggcagttcgcgtcctacgattggtaatataacagttttaccgattacatctttgtatcgttcgtcattagggttaacaacaatcgctgtatcacctaacatcgtttctggtcttgttgttgcaatttcaataaaaccttcaccatcagcgtaaggatatttaaaatgataaaacgcaccttgaacatcttcatgtattacttcaatatcagataaagctgtacgtgctttaggatcccaatttataatacgttcgccacgataaataattcctttattgtataaatcaacaaaaacttttttaactgctttacttaaaccttcatctaaagtaaaacgttctctactataatctaaacctagacctaatttagcccattgcgcacgaataaatgacgcatactcttctttccaatcccatgcctgttctaaaaacttttcacgaccaagatcatatctagttattccttgttcatttaatttagcttctacctttgcctgtgtcgcaataccagcatgatccatacctggtaagtataacgtatcgtatccttgcatacgtttcatacgtgtaatgatatcttgtaaagttgtatcccatgcatgtcctaaatgtaatttaccagttacatttggtggcgggataacaattgtatatgtttcttttgatttatcttctgacggtttaaaataaccattctttacccattcttcataacgtcccgcttcaacttcacgaggatcatattttggtttcatttccatttgctatacctcctaaaaaataaaaaatatccatcctatatacaaataggacggatattccgtggtaccacctatattcaagaaggatgattaatatcaaattcactcttttaacataattggaataatcataccaatgctatcatcgtgaaatttgaaatgcttcatctcttcaagcactctagattatgattaacgctcaaacacgtcttagcctactattaatcacgttcagctaagatactctgtgggctaccttcagtaaaaatcatttacatactcacaccaaatcatatgctctctttaaaataatttgaacttactcttcccaaatcctatattaaactcttaacttatagtataatgattgacaaaataagtcaatgtataggtgggaataaaatgaatgaatgcgcatttggaactaaagatccagtctacttagactatcatgatcatgtatggggacaaccgctctatgatagcaaggcattgtttaaacttttagcattagaatcacaacatgctgggctatcttggttaactattttaaaaaagaaagaagcctatgaagaagcattttatgatttcgaaccagaaaaggtagcacaaatgaccgctcaagatatcgaccgcttaatgacttttccaaatatcgttcatcatcgtaaaaaattagaagcaattgttaatcaagctcaagggtatttaaaaattgaacaagcatttggtagttttagtaaatttttatggtcttatgtaaatggtaagcctaaagatttgcagtatgaacatgcttctgatcgtatcacagttgatgatactgcaacacaactatctaaagatttaaaacaatacgggttcaaatttttaggtccagtaacagtattttcgtttttagaagcagccggtttatatgatgcacatttaaaagattgtccatcaaagcctagacacaattaatttgctatagcatcataaaataaacgagacatcatctatttttaactaatagactgtctcgttttttaatgtagaaatttattcaaatcacaagttaaagttccatgttaatgcactgctaatattagatatcttaatttaaaaatagatgtaaaacctttgcttaaaccttaataatgaattctatcctaagcataatttaacttaaatggatgatagtttctaatcttcacgcttattcgaacgatattttaaaaagtaattaattcctggtgcaataataaataggatgaaaaagattcggaaaatatgataactcgtaatcatagcaacatcggcaccagtagctaatgcaactaaaactatctgattaacccctcctggcgctgcaccaagaaacaattcattaataggattattatcaaagaaatgtatgacataaaccatgattagcgcaccaattatcaacataatattttgaattgtaattgcgattgctagtctaccttttaaatctgacaataaatgcgcaatttgaactccaattctaatcatatatattagttgtgccatgttcaacaaccaatgatctagtgtaaatgttagacctgtagaaaaattccaaacaattaatacaatgagtggtgctaataattgaaatgttggaaactttattttagacataattagataaactataaatatagctatcgctaaaataactatttgccctatgtttaatacttgtgataaaggcaagacttttgttaacttaccattcacatgcatgttaccatcatgaaaaaaatatgaaatgaacagtactaaaacaacaacaaatataattcgtgatgtttgcgttaagctaacaactaacaaattagcacgtttgtcttgttcagccatgaccaacatttgtgttagtgctcctggtataacacttaaaatagctgtttctgtattaatacgtgcaatttttttgaaaataaatgccattactaaggcaattaataatatcgaaatagatacaacaataatcgaaagccaattgtctttaatatccataacaacatttttcgtaaacgttgatccgatttgcacacctaatagtacaatacctaattcactaagtaagaatggccatttaatatcaagtttgaaaacttttacacaaatgattgatgcgataataggaccaaacataaatgggagtaaaacgtgcgatgaatacagtagaatactaataaaaaatgataaaacgaacacaatgaaattatttctatatatcattgtcatgttttccacttctttcaataaaaaataaaatgactaaattgctgcttgagcttcacgtttgttaagataacaatatccgctagcagttttgactacaaatcatatatggactttcactatcaagtcgtagtccatgcctgatatacatttaaaaagagcctgaacaaagttcaggctctcaatttgtccgtatatttattttacaatacgacttaaagccgtatcaaatgcttgaattgttttttcaatatcttctttcgtgtgtgccgtagataagaatgtaccttcaaattgagatggtggtaaaaacacaccttcttttgccatttcacgatacatttctgcaaataatttcaaatcacttttattcgcttgttcaaaattagttacaggtccttcatttaagaaataaccaatcattgaacctgctctatttacagttattggtacattgtgtttagcaaatacacgctttaaaccgtcttcaagtatatcgcctaacatattaaaatactcatatgtctctggcgttaattgacttaatgtttcataaccacttgtcattgcaagaggatttcctgataacgtacccgcttgataaatatttcctaatggtgctatatgatccatgatttcttttttaccaccaaaagcacctacaggtagtcctccaccgataacttttcctaagcaagttaaatctggtgtcacaccaaagtgaccttgtgcacaatgataaccgactctgaaaccagtcattacttcatcgaaaattagcaatgcgccgtattcagacgtaatatctcttaatccctgtaaaaaaccttcaatcggcggtacgacacccatattaccagcaacaggttctacgattacaccagcaatatcgtctccaaatttttcaaaagcgattttaagtgcatctaaatcattgtatggaactgtaattgtatttttagcaataccttcaggcacaccaggagaatctggcaatcctaatgttgccactccagacccagctttgattaataacgaatcactatgaccatgatagcaaccttcaaatttcacaattttatttctgccagtataacctcgtgctaatcttaaagtatctaatgtagcttctgtaccagatgacaccatacgtactttttctattgaaggtactcgatcaataacgagctgcgccaatttattttcaagtaatgttgatgcaccaaaacttgtacctttatcaattgcttcatgtaaatgactaataacttgagggtctctatgtcctaaaataagtggcccccaacttagtacatagtcgatatactcgttaccatcgatatcataaatttttgagcctttaccgtgatccataaaaattgctggtgtatctactgatttaaatgcgcgtactggactatttacaccaccaggcattaaagtttcagcaaccttcattgcttcttctgacttcgtatatctcataaagtaaattcctcctatagtttatggaaaatcatacatataaaaccttatttatctaaatagcgacaaatgtcctttgcaaaatacgtaataatcatatcagcacctgcacgtttcattgaaaccatttgttccataacgacacgttcttcatctatccaaccattttgtgccgctgctttagtcatactatattctccactcacattatatgcaacaactggaacattcgtatgatttttaacgtctcgaactatgtctaaataacttagagcaggtttaacaatcatcatgtcgcacccttctttaagatcactttctaattcacgaagtgcttccaaacggttagcagggtccatctgatacgtttttctatccccaaatgatggcgctgaatctgctgcatctctaaaaggtccgaagaaacttgatgcatacttgacaccataactcattataggaatattgtaatagccggcttcatctaatccacgacgaatttcagcaacaaaaccatccatcatattacttggtgcaataatatcagcaccagcttctacttgagaaattgctgttttaacaagtagtggcaaagatttatcattgtcaacgtcatgtgtatggtcatcaatcacaccacaatgaccatgatcagtatattcacataaacaagtgtctgcaacaattaataagtcatcatacatttttttagcaatacgtgttgcctgttgaataacaccatcgtgaatgtatgcaccagtacctatatcatcttttgagtttggaacaccgaaaaacataatggcacgtatgcctaagtcataagcttcttttaattcactttcaagtaaattcaaactgatttggtatacacctggcaatgacttaatttcttttttcacatcgtctttttcaactacaaaaattggatatattaaatcttcttttcttacatgattttctctaaccatatctctcattgtcgctgatgatctcaatcttctatgtctatcaaatttcatttttagcccctactttctaaaatcttttcaattagtgattcgagtgtttgaatttctgcaattgttactggttgttgatatgatttaatggtccgtgctgtttgttctccaatagcaaaatacgacttgaattttggtacaaatccttcattaaaataataacgtactgccgacgaacttgaaaatgttaatgcatcgatttgttgatgttctatcatttctttaacatcttgtatattttgtttgttaggcactgaagtatataaatctattttaacaacttcattatctttagataacgctgctgataacaatggtctcgccaattcactcgaaggcaaaagtattttttggttagtttgattaaatgattttaaaaatccttcttgagaaaagtcatttggcataaaatcaactcgaatgccaagtgattcacaatattgtgctgtcttacttcctatcacagcaatgttatcaacattaattccttttagatatttataaaagaatttcacagcatttttagatgaaaaaataagccagtcatagcgttgatttaacaaatgaatatcaaaatttagtggctttatatcaataaagggtttatgaataattgatactaaatcactttgcatgtcatttgtttgtgtcataactacaactggcttcatatttaaacgtcactccattatttaatgttgttcatttaagcgttttataatttcataagcaccttgctcttttaatttgttactcactgttttgcctaactcaaccggatctgttccgttcattgtatattcaaatcgttctttaccatctggggtcataattaaacctgtaaattcgatttctttttgatctgagattgtagcatatcctgcgattggcacctgacaactaccatccatttctgctaaaaacgttcgttcagcagtcacacattttgcaacctcatcattatgtactttgcttaataatgataatagttcatcatcgtcactacgacattctatccctaaagcaccttgtccgattgcaggtaacaatgtatctctatcaagataagatgttacgatatcatctgaccagcccattcttcttaaaccagctgcagctaaaataatcgcatcataatcttcagtttgtaacttttctaatcgtgtatctatattacctctaatccatttaatctctaaattaggatacttagataatatttgtgcaccacgacgtaatgaactagtaccaataatactaccttctggcaattgagatagtggtgtatgtgttttagaaatatacgcatcaaaaggtaattctctatcagggatacaacctaatgttaaaccttccggaattacacttggtacgtctttaagcgagtgtattgccatatcgatatttttttcaaaaagttcatgttgtatttctttaacaaataagcctttgcctccgactttagacaattgtttatctactatacgatcgcctttcgtgacaatttctttaatttcaatttctagatttggctctacagcttttaatttatcaataaattgctggctttgtgttaaagctaatttacttcttctggagccaacgactaatttacgcatgttcaattcctcctaggaacggattgctctagattattttctcaattcacaaaatgtgttgcaaaaaataaattaatcatatttaagcaaaataaaataatgttatagtatattaaataccttgaattcaaccatttgttgattctaagtaaaatataacttccatataacaatgtaataattgaagagagtattaccttcgggtcaatgaatatacgttcaccaactgaaattacaccccactgggttcctaaaataatactaaatatgagaattatccacccacttaacgttgagtaaaacacaattgattcaagtgtagcaacgctacctattctaaagtatttctgatcaaaacgcttttccttcaaattacggtattgcatgatatacagtaatgcattgacaaaagctaaggcaaagaagacataactcaacacagctagaccgatatggactaacagtaactcgtctacaacagcaattttctgaaccttattagtataatgtgtcggttgaaatgtattcatccctaaaagtgttaaccctattaaattcaagaaaaacacggagaaattcaaaactttgataaggttaagaattaaagagattgaaataatcagccaacttaaagtatagaatacatctgaaatagaccctaatggaatatgtctagtttgtataataaaaatagataaagagattgtttgtaaaacccaaacaatccccaataaatatatgcctaaacttctaatcttatgacttttttggacaaaatcataaaaatagcaaatgatactgattaagtatattaataatataatttcattgaatcgaataaacaggttttcttgcatattatcaccatattaatatgcttattcaaaactaaagatacgtcgcgctgaaatttccttgaccttgctttctttttgttgcatcgcttgctcatgaggacattcagcttcgatatcaaatatattttgaaatagctctaatttttcattacttttcttatcactacttaattctttggcctgtttaataggatctttcaacatttgattgatgatactttttgtatgtttagatataattttacgttctctttcgcttaaccttggcaatttacgatcaatactgtccatcgtttccgcttgaattgccatagctttttcacgtaaagctctaatcactggaacaacacccaacatactaacccactcattgtgtgcatgtatttctgcaggaatttgttccgaaattgttgcagccgctaattgtcgctcacgtaagtttgcatcaactaaaccttttaagtcatcaacatcataattaaagatgtttgtgatggcacttataccaggttcaatatctcgaggaactgcaatatcaatcaatactagtgaatcttgctttctattttctgcaattctttctatcatttcatttgtaatgatataagattgtgcactcgttgaactaatcacaatatctgcactttcaagtaaatttggtaatgatgatagttcatcatatttcacttgatgctttgctgctaatttcatagcattttcaattgttctatttactactgtaatatcagtaattccagaaccaagaagatttaatagtgataattcactcatttcccctgcaccaataatgatagcttgcttacttttcaatttgccaaatacttttttcgccaactcgaccgcagcataagacacacttacagcattatcagctatatctgtttcattatgtgctctttttgcaaaagtaattgcctgtttaaatagatgattaaaaattgttcctgtcgtacctgtgctttgcgctaagaaaaatgcatctcttatttgacctaaaatttgagtttctccaagtacgattgaatctaaaccagaagtgacacgcaataaatgttctactgcttcgtcccccacttttacttctgacattgctttaatatcatctacttcaaatccaaatgcacgagctagaaatcgttgaatatagtaacgacctgtgtgaatttgatcaacaacagcatatacttcagttcgattacatgttgataatatgacattttctaaaatagatttagtttcatataaatcttcatgggcaattcgtaaggcatcatctctaaaagcaacttgctctcttagtgcaacatcagctgtgcgatgatttatactaattgcaataaaatgcatttgaaacgcccccatatatactaacaatacaaatattataacataatttaaaatccaattaagtacgatgcttaaataaattataatctttctaatttacttttaagtttttgacaaaatgatgaacgttgaaaaatgttatcaattgtgtactaattaaaagtttcgtgcttacattatttttaaaatttttgtataagttttgtcgtacaaagactatgaaatatacggttcaattaaattccatatttgttgttgtttattattttgaattgatgaataacttactattgtatcgtctggatccatatctaattgtgtcttaatatttttaatatgcttttgaactttaccttttggaattttgtcttctttagtgcatataactaaagtaggaatatcaaaatgtttcaaataattgtacattaagatatcatcttgtgttggatcatgtcttaaatcaactaattgaataactaattgcaaattctctctcttagttatatattcctcaatcattttcccaaatttttcacgttgtgttttacttactttagcgtatccatatcctggaacatccacaaaaataagttgttcatctatattataaaaatttaacgtttgcgttttgccgggttgctgtgatgtacgtgccatattttttctgccaatcatactattgataaatgtagacttacctacattagatcgaccgctaagtgcaacttcagacaattctgtttctggatattgttcttcctttactgcactaatgattaattctatattattaggattaactttcattttatatcctcacttttttatattctctttcaactttaccattatataatatttgaacctttcggtatacattataaaaaagctccgatcaaagttaaactatttgagcgtcaactttgattggagcttttcacttttataacacatcaatgattaagctgatgttttactattattaattaaattaccttctgcgtcgtatagttctggttcagtttcttcattaattgtttgtgctgtaataactaccttcgttacattttcgttagaaggcacatcaaacataatatcgattaatgattcttctatgattgaacgtaaaccacgcgcacctgtttttctttcaattgctttttcactaattgctgataaagcttcttcagtgaactctaaatccacatcatctaattccagcattttagtatattgtttcacaagtgcatttttaggttgcgttaagatgtttttcaacgcagttacatctaatgtttctaaattagctacaattggcacacgtccgataaattcaggaatcaaaccataggcttgcaaatcttctgggcgaatttgtgctaataatgcttgttcgtcatatttatcagcttcattgcttgagaaaccaataactttttcaccaagacggcgcttaatcacttcttcaataccatcaaaggcaccaccaagaataaataagatatttgttgtatcaatttgaatcatttcttggtttggatgtttgcgtccaccttgtggcggaacacttgcagtcgtaccttctaagattttaagcaatgcttgttgaacaccttcacctgaaacgtcacgtgttatagatgtgttttcagatttacgtgcaattttatcaatttcatctacataaataatacctttttcggctttatcaatgtcaaagtcagctgcttgaattaatctcaacaagatattttcaacatcatcgcctacataaccagcttcagttaaacttgtcgcatctgcaattgcaaatggtacattcaacgtcttggctaatgtttgagctaataatgttttaccactacctgttggcccaattaaggcaatgttacttttttgtaattcaacatcatcttcttttggtcctaattgttgaatacgcttatagtggttataaacagccacagctaaagattttttagctttttcttgaccaataacatattcgtttaaatgatccataatttctttaggagtaggtaattctgtaatcgcttcagaagtgttttgagctaattcttcttcgacgatttctgagcataattcaatacactcattacaaatatatacaccacttcctgctacaagtttttttacttgatcttggtcttttccgcagaaagagcatttcaaattttcttcatcttcattgaatttaaacattctttttacacccctattcgttaaagactatactagattggatattacaatgcaacatattaacatacaaactttttgcttaaagaatagtagcagatacataagctatgcatctgctactcatttttgtaatttaatatttaatgaagattaatcttctttagttccttcaacgaactttgcgttatctcttaataaatcgataactttttggatacgaacatcatttttaatgatatcagtattacctaaagtatttttgatatcttcaactgagatattaaattgtttactcattttttctaattctttatcgatatcttcatcagtagcttcgattttttcagcttcagcgatcgcagttaaagttaagttagttttaacacgttgttctgcatcgtctttcatttgctctcttaattgagattcatcttgacctgagatttggaagtacgtttgtaaatctaaaccttgttgctgaattctttgtgcaaattcagacaccatacgatctaattcagtattaaccattgcttcaggaatatcgattgttgtattatcagtagctttagtaatcgcttcttctttttcaacattttctgcatctgtagctttttgttcagctaaacgtttacgtaagttttctttgtactcgtctactgtatttgcttctgcatctaattcattagcaatttcatctgttaattctggaacttccttgaatttaatttcgttaacttttgttttgaaagttgcttctttaccagctaattcttcagcatggtattcttctgggaatgttacgacaacatctttttcttcgtcaactttcataccttctaattgctcttcgaaaccaggaatgaatgaacctgaaccgatttctaaatcgtaaccttcagcttgtccaccttcgaattcttctccgtcaactgaaccactaaagtcgatgttaactgtgtcgccattttcaacaacaccatcttctttaactaccatttcagctaaatgtcctaagctgtggtcaattgcttcttgtaactcatcatcagataattcagtttcttgtttttcaatttcaagacctttatagtctcctaatttaacttctggctcaactgtaactgttgcttcaaaaatgaaatctttacctttttcaatttgagtaacacttacttctggttgtgcaactggtttaatatcagtttcgtcaattgcttcaccataagcatctggtaataaaatgtcgatagcatcttgatataatgcttctacaccaaagcgttgttcgaaaattggacgtggtactttacctttacggaatccaggtacgttaatttgtttaaccacttttttgaatgcttgatctaacgctttgtttactttttctgcaggaacagtaacagttaataaaccttcgttaccttcctttttttcccaagttgctgtcatgtatatatacctccatgattaactaatttattttttcaacttccctattatatcataggtctattccctatacaaacattgaaatcacaacgtttatatatttgtaaatcaacttttttcgtcaaaactatattaaaatgctgagtattattttgcaacaatttaactattattattcaaatctaattgctgaataaaattaaatgcatcgatactttgtaattcacatttaagtcctaacatatttttgaaataacattcgtatgcattaatccatttattcgtttcaaacaaagtttcaatatcaattggataaatcatgatagagtgattattcataatatggtgtgcttcttcagcgatatgtaaagcaccatcatttaatgtttccataacgttaggtataactttttctttcagtgttgtatgttctagcccttttaaattagctggtacaaaagttacatccataccatacttttcaattgtcagttcttgtgtacaatttgcgaaccttaaatactcaatcattaaactaattaggttataactgtacgtattagattttaatatatataataccgtttcttgaaattgaaaatgaccattgtctattaacttcaaaatcaagtgcgtctgttccctcattgataatgtatcaaaatcagttaatgactgagtcaatcgtttttcatcttcaattaattttgacttagcaaattccttaagaggatgtaatgccattcttgttttgtgatctttgacttcatcaataatttgatgaattacttctaccgcttcaaaatattgtcccaaaccaatcaaacttttcacgtaataaatcatcaatgcatcatattgttgtatgccagttttcaataacacaattgtttcttctcttaattcaagaaatgaccccgtctcatataacatacggcatttcatcattgctatttcttcagtgagttcaaattgacgttcatattgtacaatatattcatacatcaggtcatagttttggtcttgttcagcacgttttatatctttatataactttttcgaagagttaggaaactgaataatatctgacatatatgtcacctcgtttgattataaatcttgaaggattaatgcgctccacgtctcgaaatcatcatatgactctatgttgcctttttcaacccattttattcgtaaagtatctgtttctttagcttctacatcattcgtacttacagtgattttaaatacaacaccaatatgtaccttgcccacttcgttattatcgtcattaataaaaccgatatattccatattttgtgaatcttgctcacttaaacctacttcttcttctaattctctctgtgcattaactctcaatacttcgttaatagattctgctcctggaacatcattcatatgaccgcctacacctattgaagattgtccatgcaatcgagcttctccaccgccagataatcgttcatacactaatatctcgccatgctcattttcaagtaaacaataagaaatgagttgtttatatgatggatcctcttccatatcgccgcgtcgcttaacttcatattgacttagcgcatcaaaaatattttgaccttctggtttattcttatttaaaaacccattgaaagtattcttttcattattaaaaataatttctctaggtactacaatgatttgttcatcaaatttagacatcgtataaaactcctcactttaatgtttgttctcttaaatgcattttagcaaatatgtcatattttagcgattaaatgtggcattttgctatttaaaaaataaaaaagagatgacaatgccatctcttttttataagtgttattattttaaagcatctttagctttagttactaattgagcaaatgctttttcgtcagaaattgcaatttctgataacattttacggttaatgtcgataccagcttttttcaaaccgttcattaaacgtgagtagctcatttcatgttgacgagctgctgcgttgatacgtgtaatccataatttacggaagtcacgtttacgttgacgacggtcacggaaagcgtattgacctgatttcattacttgttgtttagctactttgtataatgtatgttttgaaccgaagtaacctttagctaatttaatcgtttttttacgacgcgctcttgttactgttccacctttaactcgtggcataaaaaattcctccttaggtaattcctaccgatttctgtatttgttcttattttttgtatgctaataattgttttacacgtttcatgtcgctcttagacactaatctagctttacgtaattgacgtttttgtttagtgctcttgtttgcgaataagtgagatgtgaaagctcttgaacgttttaattgacctgaagcagttcttttaacacgtttagctgctccgcggtgagttttcatttttggcataatataaatcctcctgtaatagctttaattatttttcagctgttggcgctaacatgataaacatttgacgcccgtccattttaggtttttgttcaactgttgctatatctttgcattcatctgcatatttttctagcacacgttgaccaatttccttatgcgtaatggcacgccctctgaaacgaatagatactttacatttatcgcctttagttaagaatttacgtccgtttttcaacttagtttggaaatcatgttcctcaattgttggacttaaacgaatttctttaacattgataattttttgtttctttttcatttctttttcttttttctgttgttcgaatttgaatttaccgtaatccataattcttgcaactggtggtttcgcattaggtgcaacgaccactaagtctaaatctacacgttcagccatttctaaagcttcacgctttgatttaacaccaatttgttcaccatcttgaccgattaaacgtaattcttttgcacgaattttgtcattgatttgagtttgatcttttgctatggttgacacctccaaaatttttacgaaatttgcaccaagcaaaaaggaagagcaggtataaaatacccgctcttccttatacacagttatgtgtaatgtgattaacctgccaactgctttatgcgtcgctacaggtgagaagcgggtgcttctacttggttcgtttcgtattcaacgttgttaatcataccaacatttcacatttaagtcaacactataactgtaattatttttattttaaccttttatttcatccattgacacgtcttgacgtaaatctacttgttctaatggaatttttttcgttttatatcgaagcttatgataaataaagaatgctaaaaatactggaattcccatatacgtaattaagaagcggctaaaattaaaatctcctgttttaataaagtccacatcttgaccgatgattacaacaatacataagatagctgcaaaaataggtccgaacggaaaccatttagctgtatatttcaatttagatttatcataattttgtttatcaaatgctcttctaaatcgataatgactcactgcgatacctacccaggcaataaagccagttaacccacttgcagcaacgatatattgataagcaccttctgtaacactttgtaccacaaatatgatgactacaataattgcagttactaataaagacatatatggcacaccatttttatttgtttttccaaatgtttcaaacgccaatttatctttactcattgaataaagcatacgcgttgaggcatacattccagagttacctgctgataaaactgatgttaagataacagcattcataaatgaggctgcaaaagcaaatcctgcatttttaaaaactagcgtgaacggagaggttgcaacgtcattaccgcctcccattaatgcactactatcataaggaattaacataccgataacaaaaatggctaaaatgtaaaataataaaattctccagaatacttgtttaattgctttcggcacagcacgttcaggattttctgattcaccagccgtaataccaattaactcagtaccttggaatgagaaaccagcgattaagaatacacctagaattgataataaacttcctcctaagttgccacctaaaataggtccttcacctttattaaatatttcgaatcctacaacatgaccacccatgattccgacaatcgttaataaaccaattgcaatgaaaacaataactgtaaccacttttatcaatgccaaccagtattcactttcaccatagacgcgaactgataacgaattcagactaaaaatgataactaaaaacaacgcgctccatgcccaagctggtattccttgtaatggtgtccaatattgaatgacttgtgcagcaatcgtaatatctgctgctactgttactacccagttaaaccaatagttccaaccaagcgcaaatcctaaagatggatctacaaatcttgtagcatatgtactaaatgaacctgatactggcaaatacgtagccatttcgccaagtgacgtcattaagaaaaataccatcattccgataattgcgtatcctattaatgcacccaaagcacctgcatcatgaatcgctccaccagaagttacaaataaacctgtaccaatacaacctccaatcgcgatcatagatatatgacgatctttaagtccccttttgacaacattgttactttcattttgaacttttgacatataagctccctttccatgttttagaggccaagaaataaataacctttattcactttcatacccttttttacagaacatagtgatattaaaagtaaaaaagtggctacatacctttaagatatgcaaccactttggcaattatctatataaggtagcacatcacattctgtgacagtacagttcctattcgaaaactgtcccaatagatataatttatggtttatatctatttcggcatctttacctttcacttgttcaacttatgtaccataaatacttctgacaagttactaattaaacatgcaacctctaactcaatttaatattttaactaacttgtaatatacaggattcatcacgcataatcaaccctgtaaaacttgatacgcaataaaaatttcaaagcattttattgcgacaactgtctatctatgttttttcaaacgaatttcatcaactagattccagataaattcatctttttcaactgtttcttggtcttgtgatccatattgacgcacattcacttgattattttcaacttccttatccccaactacgatttgataaggtattttttgcatttgagcttctctaattttataacccattttttcattacggtcatcaatacttacacgaacgccttgagatttcaattcatcttgtaattggcgcgcataatcataatgtaaatcaatgttaactggaatgatttgaacttgttttggcgctaaccaagttgggaatgcacctttagtttcttcagttaaaaatgctacaaatcgttccattgttgatacaacaccacgatgaataacaactggacgatgatgttcaccatcttgaccaatataagttaaatcaaaacgttctggtaataagaaatcaagctgtgctgttgataatgtctcttctttacccatcgctgttttaacttgaacatctagtttaggaccatagaatgccgcttcaccaatcgcttcttcatacgataagccaagctcatccgctgcctctttaagcatattttcagctttattccacatgtcatcatcatcaaagtacttttctttatcttcagggtctctataacttaatctaaagctataatcctcgaaaccaaagtctttatacacatcaataatcatgtttacaacgcgtttgaattcttctttaatttgatcaggtcgaacaaagatatgtgaatcatttaaagtcataccacgaacacgttgtaatcctgatacagcaccacttgcttcatatctatgcatagttcctagctcagcgatacggataggtaattcacgatatgagtgtggtttattcgcataaatcatcatatgatgtggacagttcattggacgtaataccatagattcagtttcatctaactgcattggtgggaacatatcttcttgatagtgatcccagtgaccagatgttttgtataaatcaacattagcaagtactggtgtataaacgtggtcataccccatgctcacttctttatcaacaatgtaacgttcaatttcacgtctaattgttgcaccgttaggtaaccataatggcaaaccagcaccaactaattggctatttgtgaataattctaactctttaccaattttacgatgatcacgttctttacgctcttctaacatttgtaaatgtgcttttaattcttttttatcaaagaaagcagtaccgtatatacgttgtaacattttgttgttactatctccacgccagtatgcacctgctgtagataatagtttaaactctttaattttagctgttgatggaacatgaacgccacgacataaatcagtaaaatcaccttgactatataatgttacattttcatcttccggaatcgcatcgattaattctaatttgtattcatcattgctgaataactctttcgcttcatcacgtgaaaccacttttcgttcgattttcatattttcattaacgatttgtttcattgttttttcaatttgttcaaagtcatcagatgagatgttttggtcaatgtcgaagtcatagtagaagccaccttctattacaggaccaacaccaaatttaacattaccatataaccttttaatcgcatgtgccattaaatgtgcagtagaatgacgtaatacctctaacgcttcttcactacctggtgtcacaatttcaattgacccatcagtttcaagcggttcagttaaatctacaagttgcccgttaaatttgccggcaactgcttttttacgtaatccaggactaattgattgtgctatatcttcagtagtagtacctttatcaaacgcctttttattaccatctggaaattgaatattaatttgttccatgttaaaccctcctatttgctttataaatacttttatctgacctcgttaaaaaattgaacaacaattatcgttttaacattagacctattaacaataaacagggaatttatgacaccaacaaacatttttgtctgaaaaaaacaaaaaatcccgcccctatacaagggacgagatcgtcgtggtaccaccctagttatttaatacaagttatgtattaaatatctctgcttaagataacggtcttgagccgggtattcattacaaataccataaatgaagtagtaatcatctaatttattaaccatattctcatcaaacaatggctttctgtgtaatattgattagatcatcttgtcttcaatcatttaaacgatttagatttgtattcattatacaccaatcattttaaaattcaattgtttctgaaattttctcctgataaaaagtatggtgttgacaaagatttgacacgttcaataatacgtgctgctttagtcttctcttcaccatcacgagtcatcgctaaatgatgttccaattcactatagtcaaaattagaactaaagaatgttggtaattcatgaaccattcgataatgtagcaaaggtccaattacctcatctctcacccatggagtcacttcttctgccccaatatcatcaagcattaaaatgtttgcttctcttacgcgatgtaatttcttttcaaaagaaccatctttaaagccaccttttaatgttctaataaattccggtaaataaataattgtcgaacgtaccttcttagatttgagttgattcgcaattgcacctagaataaaagatttacctgtcccaaatggaccataaaggtaaaggcctttcacttgttccccattagttattgctgtacaaatatcatctgctgccatagctacatcaagacggtctcgatgattcatataaatatctttcaatttggcgtttaaagtatctcgttgcatatgatgagatgtaattaactcagcttcaaagcgttcttcgtcgtacttgattttacatggacattgtaaatagcgtattttaattcggttattatcaacatataactcaggcacatgcccctttacgaaatttggacaatcagcaaatttatgaccgtcataatgtttttgttgatctttatactcttgtaacacatttaagtcttcatcaatcatagcattcgttaattcagctcgatgcgcttccaaaaattgcttaacatctgggtcattgattacttctttttttatcttttctattcttttttcaaagtcctgcgacgtgttaattatacttttaaattgcttcattattgactgtcctcctcccattttttagataatttatctagaaatgcttgtcgatcttgctctaattgttgatcatctacgctattgtctttagccgaatcttgttcactaggtttatctctattttctaaccatttaggtgttttttcttttgaaatgcgattacgctgcccatagtatgaaccacgcttttggtaatttccgctagacccctcatttttaggttgattaacttttttagcgtaattatatgcttctttagctgtcttaataccttttttcttccaatttgatgctatttccaaaatatacgctttaggaagtttcatatcttcttttaacatgacaaattgcaacaaaatattaatgacgccaaaagacattttttcacgttcaattaattcttcaaccattgtcttttgcgatatagttggttctgattcagaccaagaagctaacatatcaattggactcgtttgttcaagtaattcaaaccattcatcactttgtggcattggattcgcttctgtagatttggccgtcgaagatgatgtagcaggagatttcacctgtaatttaggcatttgattttcgtgttcaattaagtaatacgagcgtgcttgtttacgcatttcttcaaaggataactgttgtccacttgtaattgaatttaaaataacatgcttcatgccatctgctgttaaaccatataaagtcgcgagttgtgtaattaaacgctttgcatctttggtaacaatgtcttgactaataaaatgtttacctaacatttgtctcaacatttcaaagtcaaaagattcatttgataaatcgataccttggtacggttcattaatcggaatatcacttgtatcgatatctatttttgtagacggcactttaaaaacatcagtgaattgtctcgttacctgtttaaattcactcaaatcaatttgttgatactcaaagtatttcttcaactcatgaaatcgacgatgctcgacttcactatataaaaagattgacaacattggatcattaaaaaataaatgtgctgaaggcggttgaattaattggtaaacaaattgtgtttcttgttcatcatgtttgacaaacgcctttaacaatccaatcgcttcaagtaagtccatttgttgtctaaactctagtaaattaattttaagttcattcataaaaatataatgagaaagaatcaatgtttcattatgactttctttaacgaattgagtcataaaatggtataaacccactgcttgtgttccaattagcggtgtatacagtcgattcaatacctctaaatgattcgtatttaaatcaaagtgttgcataactttgaattgatcctttggtcttaagccgaattcgaaggcttgtcgtcccatttaagcatcactccgtttgttttcgcttaaaatcccttgcatcgatgctaacaattgatcaacatctttaaattctttatagactgatgcaaatctaacatatgaaacttgatcaacatgcattaacaagttcataacgtgttcacctatatctcgtgaagacacttccgtatgaccttcatctcgtaattgccattcaaccttgtttgttatgtcttcaagttgttgatatctaactggtcgtttctcacaagaacgcacaagtccattaagtattttttctcttgaaaactgctctcttgtgccatcttttttcacaactataagctgactaacttcgatatgttcaaatgtagtgaaacgtgttccacaattttcacattctcttcgtcttcgaatggcatttaattcatcggcatgccttgaatctacaactttagattgtgtagaattacatttcgggcatttcattacatcaccctctttattttgattatgcctaattatactataaatctagagatgaaaaaagaatccctcaatttaattcatttaaccaaataatgaaacaataaaaaacattatatcgttacttattaagtaataagcatgacaatattattgtattaaaaataaaagacctaactccgaggtcagagttaggctataaattaattgtattaacttgcacttacagtttcttttgatgtcaaaagtgctccaatttgctcagcgacatctacaactctatttgaataaccccattcattatcataccaagcaataacttttactttattctccgacataaccattgttgattttgcatcaataatagctgaatgtggattagtattaaaatcaacagacactagtggttgatgttcgacttcaatgataccttctaaacctgcattttcaaaagcttggtttacttcttctgcagttacttctttttctaaatcaacaactaaatcaacaagcgatacattctttgttggtacacgtaatgccatgccgtgtaatttaccttctaattctggtaatacttcttttaaagctttcgccgcaccagtagaagtaggaataatgctttcattacatgagcgtgcacgtcttaaatctttatgtggattatcaatatttttttggtcatttgtaatagcgtgaacagtagtcattaaaccattaactattccaaactgattatttaaaacttttgcaactggaccaatgcaattagtagtacatgaagcattactaaaaatgtcaaatgcttctatatctaattggtcatcatttacgcctttaactaccatttgaacatgtccaccttttgaaggaccagttaacaatacttttttggcacctgctttaatatgtgcgatggctttatcaccatgattaaatttaccagttgcatctatagcaatatcgatatctaattctttccatggcaagttttcaggattgcgatcagcaaccaatttaattttatgatcaccaacttgcaatccattttcaatcggttcaacttttagattatattttccatgtgttgtatcgtaattgattaaatgtgcaattgtttcgggtggataactagcatttatcgctactacatttaaatttttattttgtaatgcaatacgtaataccattcttccaattctacccataccattaattgcaatattcgttgacattaaaagcaccccttgatttttatgtgttatactttatggaattagtatagcatattatatgaaatttgaaagcgttttccgttgatttatttatcttttttataaaaaatagtcattacttacatacatcaacgcatacgtaaagtaatgacttatttatagagtaatattaatcttcttctccgtaattcggcttttcaatataaccttcttcttctaacaatctctcaaggttttgttttaattcaagtttatcacctaaattatcgataacatgatcggccattcggctttttttatcaatagaaatttggctatagacacgagcttttgcatcttctaatgacaaattattacgttgcattaaacgatccatttgtatactttcagaagtgtatacaacccacacttcgtctactgtattttccaattcattttcaaataataatggaatatccatgattacattatatccttgttttaaatattcttgcttttcttcttccataatatctcgcacgataggatgtatgatagcatttaattctaagcgtttttctggatggttaaacactaaatcacccatataacgacgattcatctcaccattttcatcaattgcttcatcaccaaagacttctcgtacttgagctaaacctttgctcccctttttaacagcttccctggctgctttatcagcatctactactttaaaaccgaatacggataagagttctgatactgttgattttcctgaggcgattccacctgttagaccaataactttcggcataatttcactctttctttatttttgacatactggacaataatgactatttcttgtcgcgatgatttttgtttcaatttgacttccacacactttgcataccggctgcttatatacattgaggtgcaattgcatctcaccagtttttccatcagcatgacgataatctgaaatacttgtaccgccatgcttaataccttcttctagtacttctctaacataataaaaaaccatttcttgttgttggtgtgttaggtcttttacttttttatctggtaaaacacctgcacgaaacaacgcttcacatgcgtaaatatttccgcaacctgcgattactttatgatccaaaatcacttgtttgattggtttattcttattagactgttgatgaattcgatttaaataatacgtcaatgcttcatttgtaaaaggttcaggcgctatttctataaatgaaggataagatgctacagacgcaacatttctaatttctccaaaacgacgtatatctgaataaattaactttttgtcatttgacagctcaaaaataacatgccaatgcttacgataattaggtatcataatatcttcaagttcatctacaatgaaaaaaccacccgccatacctaaatggctaattaatgtacgttgttctcgtttattatctagctgaaaaacgatatatttacttcttcgttctacattagtaatggtatagccttccgataaagttttaaaagtatctaattcaattccttttataattgtttccttgccttgagctttaccttcaattactttatcagaaaatataacgtgttcaattttttgatttataacgtagggttcaattcctctttttacatgttctacttctggtaattcgggcataccattaacctcactttattttgcatcataccaagttgcaccataacttgagtctacttttaatggaacatctaattgcaatgcattttccattatctcttctacaaattcactaaatgaatctacttctgacttaggtacttcaaaaattaattcatcgtgtacttgtaataatagtttagcttgatatgttgtctctttcattttttgcgcaaatttaaccattgccagtttaatgatatctgcagcactgccttgtattggcgtattcatagcagtacgttcagcaaagccgcgtaaattaaagttacgactcgtaatatcaggaatatagcgtcgacgatgtagcaatgtttccacgtaacctaaagctttggcatcttttacaatatcagacatatattgttttacacctgggaaactagctaaataatcatcaatgaatgcttttgcttttttacgagtaatacctaaactttgacttaaaccataatcacttatcccataaacaattccaaagttaaccgcttttgcttgacgacgcattaaactatcgacttgatcagcttctacaccaaatactttcatagcagttgctgtatgaatatcatcgccgttgataaatgcttctttcatactctcatcttgtgtaatgtgtgctaatacacgtaattcaatttgagaataatctgctgataatataacgctatcttttgaagttggtttaaaggcttttcttattttacgcccttcttcaagtctaaccggaatattttgtaaattaggatctacacttgataaacgtccagtttgcgctaaagtttggttaaaacgtgtatggatacgttgatcatcactaattaccttttgcaatccttcaacataagtagactgtaacttagataattgacgatattctaaaatataatcaatgataggatgttcaccttgcaattgctctaagacatctacagcagtagaatatcctgttttcgtctttttaataacaggtaattgtaatgtctcaaacaatacaacacctaattgcttaggagaatttatattaaaatcttcaccagctgcatcatggatatttcgaatcaagacgtctaatttttcttgaatttctttttccatttcttctaaatcatgaacatctgtatatataccaatttcttccatttcacttaaaatcttagctagcggtagctctaaatcagctaagagttctacctgattgtattcttctaattgtttatccatatttggtttcgcaaagtaaattgcatcagtaataaaagcaacatatggatttaaaacatcatcttcaggtaccttaaatttcttaccttttccatatatactcacatcgtctttcacaaaactttgaccgtacaatgaaacaactgattgaacatcactaatcgtacgagatggatcaattatataactggccaacataatatcgaatgaaatattttgaatatcaattcccaatctatgtgatgctacatatgtttttttagcatcatatacgacttttttcgtattcggattttctaaccatgaaactagttcggcataattatttatgtcatccgcattaattacaatatgtttctcacctgtaaataaagagaattttaaaatattatttcgcaaataattgccaccgtctaattcgaaatggatggccgcttcttccaatgaagtaaaatcaacattatcaaaagacgtttcaatttcaaatgtcttttctattgcatcttcaccgcttgctgattgatcaatgtcagccaacaattgtttgaattctaacttcttaaacaattcgattttttcttgttgttcatcttgatgagtcattaacgtatcttcaagttttacttcaatcggactatctacattaatcgttgctaattctttactcattaatgcatcttctttgctgttttgaagtttttcttttaactttttacctgaaatttcatctaaatgttcatagacaccttctactgtgtcaaattggttcagcaattttattgctgttttctctccaacacctgcaacacctggtatattatcagaagtatctcccattaaacctttcatatcaataatttgattaggtgttaacccgttgtatttttccgcaataaagtcaggtgtataatgatcaacatcagtaacaccttttttagtgtaataaatggttacattatccgttgcaagttgtgttaaatctcggtctcccgtaataataattgtctgaaagcccgctttatctgcttctttacttaaagttccgataatatcatctgcctcatagttatctaattcataacgtttaatatgataagcatctaataattggcgtatataaggaaattgctcacttagttcaggcggcgttttctggcgtccacctttatattcactatatttttcatgtctgaaagtcgttttacctgcatcaaacgctactaaaaaatgatttggcttttcttcttttaaaatcttctctagtaacattgcaaaaccatatactgcattggtatgaatgcctgctttgtttgataacaaaggtaatgcataaaaagctctaaaacttaagctattaccatcgattaatactaatttattcacaattttaacctccagaactaatttatatatattttagcatattcgactgtgatgtcgtaattaaagaaactatctcatagagtatttatatacgacctaatttcaaataaaacaagtgactatatagactaagctaaaataaagaagacataatcatgattgttcttgatgagcacttcataaagtcaggttaaaagtccaacttttgagatgcacattatcatttcatgattatgtctactttttaatatttttatgctgctattttaaatttttataggtaagaataagttatgaatcgtcagaaccaaatggaatatatttaactttggtcattttcggtaattcttcataattattaaaccactcttggtaatttttattgattggtgacggatgatgcatataatgttcaaacggcaatgattccactgtataaacctcttgtcgtggatgatctttaatttgttgttttaataactgaactcttttttcatgttcataatgaacataaataaatgcactaagatatatcatagctaaaactagtgatgcacctttaataaaattaacattgattgacttatatttccgaaattcttttaataaaataattaaaatgattacatgtatcgtataaacaatcaaaaaattacctggttcaattggagtaacaatgactaatgtcgacgcagaaacacatattgcaataagtaaggaatataaagtaatttgtgttttacgattattaatagacaaataaatacctacaaatatcgaaaacgcaaagtaaccacatacaattatgttcgcaaaaccaaccaatccaatatctgtatttttatttaataaaaactgattgtaaaatagtaaataataaagcggtaaagtgataaatcctatcataatgatacgacgctttaatattgttaaatgtacataccgatcacttctaagcagtagataaataataagcgttgctatcatacttaaaattataacctgactgaaaatgacaccatatggaagtgttgttgatatcatttctgcaaattttgaaaagataccttgattattagaaacttgttgatattctgatccttcaaataaaattttgcgataatttggattggaaaacataatgattgtacctatagtagcaatcataaatgaaaacaataatttataattaagtgttcgattggcagtaaattcatacagaaaagctaaaattaaaatgatacagtggaataatgtcacattctccataaataattgaccgaagaagcttaaaacatagaatagtactgtaacacttaccggctgcttttctttatatataattgcattaatacaataataaatgataaagagtgaaattagtgttgatgtcgcataattgtaaaatcctgcaaaccagccatatgtatctgcataaatagcacttggtaaaattaacatcaaagaaaatgctaacaaataatagcttgtccacgctttacaacgtgtaatgtgcataatcatccaaatgatacccatactaatgagaccatatgaaagccaacgtaaccagcttacatgtacagctataatttcaaagatatttccgatatagcgaccattaagtgatgcaaatcctacttttaaaatatcagtattataattgctaaaccattgtaaatcatcgtgcatgagtggtagtaagatacccataaaagtataaaacaataatatcgcaattaatatcaaagttgtcttgtgtaattgaattgttttcactttactaatcctcaaatctagttaaattttcctcaacttgtaggtcgaaaaattaattcaatatttttaatgtatttctaattttcacctatgcatgtttcctcaatcaaaatagataaacaaggtatttaatattacttttcaacaatttatctaaatcgcccctcgtctttttctatgacgaatgattacacttgtgtattcaagtgtttaaattaagatttatttcctttcaaataaaacttattactttttaattaagtatctattttaagcgcgttactaaaatttctttattataataaatatattataaaattgcttgattcacaacaatctattacttataacttacaaaacgacatatgcaaatgacaaaattgacaaccgaatatattccacttcattaactctaatttaataccaatagagatttgaacgaaataaaaaagcagcaacaacttcgtgaaaaatacacgcgctgttaccactttaatttttattctttataatcttttagaataactttgaacgttgaccctttgccaacttgactattcacttcaatattaccttggtgggcctctactatatgctttgtaattgataatccaagacctgtcccaccagaatctctacttcgtgctttatctactctataaaatctttcaaaaatacgttgttggtcttctaatttaatacctataccaaaatcttgtacttcgaaaatgacacgaaagtcatctcgatacacacgaacgttaatatctccatcttcataagaatagttaattgcattcgttaacaaattcgtgataacttgagcaattttactttcttgtgctttaacaatgacatccttttcaatatcagtatgaatggaaatatttttttgattggcttgagtcatcatattatcaataatacgccgcgttaaatctgataaattcatatagtctgtatctaactcggtatgttgctcaatatgcgataaatctaacagatctgttactaaagattctattcgatttgattcttttaaaattatgttcaaaaacatgtctaatgattccgcatcattttttgcaccatcaataagtgtttcagcaaatcctttaattgaagtaataggtgtttttaattcatgtgaaacatttgctacaaattcacgtcttagattttcaagttgtttcagatttgttatgtcatgcatcacaactaaaatcccttgcaaacttttttgagatctagttaaaataggaacacaagaaatatcaaagtacttggcatggacttggtttattgcaacttccaattgttcataaataggtttttcaactttaaaactttctaaaattaattgctcaatttcagtattaacatagccgtgatagcctatttgttctatattatgtgtgatgttgaactgttcataatacgctttatttgcaacaacaatttttccatttcgatctatcattaaaatagcacttggaatattttcaatcgttgtttttaaacgattggattgcattttttgctcattattaagcttttgaaggcgtcgtgctagatcattggtagacacaaaaagcgctttagtttctacaacattactttcaggtacacgtatgtgataataaccatttgccaacaattgtgttgcataagtaacttcttgtatgggacggattaatgtacgcttaaaactacggcttgcaaaatacagacagataagtacaactaaacatgtcaatataagatatttccacaacgtccaatgcatttctgtaatatcgttattgtaacctttaatccatacatgataaccgttaaccttcttattaaaaataaaaacatcccttttttgaatatagctatcactatttgggataggtttcagtttgccactactaaacacctttttatcatttttagttatcaataaatctatattttgctgttttacaatttctttaactttatcaatctcattatcttggactaaataaatatatgatcttgcatctgttgctagagcttgttcgtgtttttctgataaaacatatgtgatggaagcgtgaataataatgcctaatgtaacaaaactgataattaatatactgcttatcaataacattaagcggtggtgaaacttcatcattattctttaggtctttccaatttatagcctaagccacgcacagttttaataagttgtggcttcttaggattatcttctaatttatctcttaaatgactgatatgtacatcaacaattcttgagtctcctgcaaattcataattccataccgtatttaacatatgctctctcgtaatgactctgccttgtctttctatcaaataaagcaacagttcaaattctttcggtgttagctccaatagctcattatgcttatatacttcaaaataatcgggtctaatacgtatcgatccgatagtaatatcatcgtcaatctcttctacttcttttacaaattgagaacgtcttaaaatggctttcacacgggcaacaacttctctaggtgaaaaaggcttagtcatatagtcatcggcacctaattctaaacctaatacccgatcaaattcatcatttttcgccgttaacattaatatagggactaaatttttatttgttcttacagtcttacatacgtcaatgccatcttttttaggtagcataacatctaaaataattaaatctggctgttcattttctaccttctctaaagcctcatcaccatcaaatgcaacaacaacttcataaccagctgtttctaagttatatttaagtaatgttacgattgaatgttcgtcatctactaccaacactttttgcgacatggtatgcctccctaacttataattatatttacattataaccgaactatttataaaaataacatcctacacattatctttacacattttttacattactttacacataaataaaatacttcttatatttccttctataatttacatgacttactctgggacaacgaaataaattttgtgaaaatatcatttctatcccactacctatgcatgagttttactcatttattcctaagcttatatacacattcgctttagttaatgtgtaagaaacactacataatcaatcattcgtgactctttatcatttctatcctgctgccaacttcaattcatttaaaaaggtgaacctagcaattaaagttgctagactcacctaagtttattttgcttattttaaatttttaatcaattcatctgcaaatgctgatgtagaaacttcttcagcaccatccattaaacgggcaaagtcataagtaacaacttttgaagcaattgtatcttcaattgaatctgtaatcttatctgccgcttcttgccatcctaaatgttctaacattaatacagaacttaaaattactgaagatggattcactttatttaaacctgcatattttggagctgtaccatgtgttgcttcaaaaatagcatgacctgtttcataattaatgtttgcacctggcgcaataccaataccaccaacttgtgcagctaatgcatctgaaatatagtcaccattcaagttcatagttgctacaacatcatgctcagctggacgagttaaaatttgttgtaagaaaatgtcagcaatagaatctttaatgataatcttgccttctttttcagctttttcttgtgcaacattagcagcatctctgccttctttttcaacaatttcgtcatattgttgccaagtaaatacttgatcaccaaattcagttaatgctaaatcgtaaccccactgcttaaatgagccttctgtaaatttcataatattacctttatgaactaaagtaactgatttacggttattatcgatagcatattgaattgctgctctaactaatcgctcagtaccttctttagaaactggcttaataccaatacctgaagtttctgggaatcgaatatttgtcgcacccatttcgttttgtaagaaatcaattaccttttcaacttctgttgtaccttctttaaattcaataccagcataaatgtcttcagtattttcacggaaaataaccatatcaacatcttgtggacgtttaacaggtgatggtactcctttaaaccaacgtaccggtcttaaacaagtaaataaatctaattcttggcgtaaagctacatttaatgatctaataccaccaccaattggtgttgttaaaggtcctttaacagcaattaaatattctttaattgtatcaagtgtttcttgaggtaaccattcgccagttgtatcaaatgctttttggccagctagcacttctttccattcaatgcgtttttcgccattataagctttctcaacagcagcatctataactcggcttgctgccttccaaatatccggtccaattccatcaccgataataaatggtataattggttcattaggtacgtttaatccttcagttccttgagtaattttttctgcagtcatagttattttacctccaaattttacatcttcatttttaatttgtattgattattttctttcttcaagcggaatatacttacgattcgtttcgccaatatattttgctctaggacgcataattctattatctttatattgttctaaaatatgagcaatccatcctgcagaacgacttacagcaaagattggcgtgaataagtcatgaggtatttccatacagtgataaacactcgcactataaaaatcaacatttggaattaatcctttttcttctgccatgcgtttttccattttcactgacatttcaaataattcttcacgaccagcgtctttcgtaatttgacggctcatttctcttaaatatttcgctctaggatcaccatctttatatacacgatgaccgaagcccattactttatctttattagcaaatttttcatctaagtaagcatcaacattttcaattgacccaatctcagataacatcgtcataacttgttcatttgcaccaccatgtaatggccctttcagagaacctacagctgctacaatacctgagtacatatctgacaatgaagataccgcacaacgtgctgtaaatgcagatgcgttcaactcatgatcagcgtgtaaaataagcgctttattgaaggcttccacttctatatctgttggtaattccccacgtaacatatataggaagtttgctgcataacttaagtcaggattaggcttaagtggttctttatcttgtcttactcgagcaaacgctgtaactaatgatgctactttagcctgtatacgcattgctctttcataacgattttcatctgattcattttcagcatcaggatcgaaatgtgcaatatatgataatgacgtacgtaatgctgtcattggatgcacgtgatctgtaacatactcctcaaaatgtgtatacacacgaggatttaatgtcatgtattgatttaatttcccctttaaatgagcaagctcttcttcatttggcaatctatagttccataataggaaaataacttcttcaaattgcgcattttcagctagatcatcaatatcatagccggcataagtcaattgactttcaataattgaacttattttagtctccgctgcgataaccccttctaaacctctttgtaattctgccataataaatttcccctttactgtttctttatgaaatggctttcaactaatattatagctaaacgcatttcgtttgtgaaatataaaaactggcattatatgtgcaacaattattttgtaaatctatgtaaatgtcacagaatggccacaaatagcaccattaaagctttttcaagattatattcatcaccaacttttagcatagaataaaattttcaattggttattatatatgattataaaatccaaagtatattaacatggaattttacacatttttaccgaaaataattgtatatatcctaatataagtgcataataaacatatctatatttaagggagatgtattatggctgaaaaattacaaagggaactgagcaatcgccacattcaattaattgctattggtggcgcaattggtacagggctattcttaggcgctggtcaaacgattgcattaactggcccttctatattactaacatatatcattattggatttatgttatttatgtttatgcgaggtttaggtgaaatcatcattcaaaatactgaatttaaatctttcgcagatgtaaccaatacatacattgggccttttgcaggattcgtaaccggttggacatactggttctgttggattattacaggtatggctgaagtaacagctgtagcaaagtatgtaagcttctggttcccagaaattccaaactggattagtgcacttttttgcgtattgttattaatgtcttttaacttattgagtgcgagactatttggagagttagaattttggttctctatcattaaaatagcaacaatcattggtttaattgtcgtaggtttcgttatgattctatttgcatataaaactcaatttggacatgcgagtttcacgaacctatacgagcacggtgtattccctaaaggagcatctggattctttatgtcattccaaatggccttattctcattcgtgggaatcgaaatgattggtgttacggcaggtgaaacgaaagatcctgttaaaacaataccaaaagcgattaatagtgttcctattagaattttaatattttatgtcggtgctctagcggttatcatgtcgattattccttggcaacaagttgatcctgataacagtccattcgtaaaattattcgcattaattggaattccatttgctgcaggcttgattaattttgtagtactaactgctgctgcttcatcatgtaacagtggtattttctcgaatagtcgtatgctgttcggtttatcaagtcaacaacaagcaccaccgaatttctctaagacgaataagtatggcgttccacatgtagcgatctttgcttcatcagcattgttactcgtggcagcattattaaactatattttccctgatgctactaaggtatttacgtatgtgacaacaatctctacagtattattcttagttgtttggggactgattatcatcgcttatatcaattatagtcgtaaaaatccagatcttcataaaaaggctacgtataaattatttggcggaaaatatatgggctatctcatttttgtattctttatatttgtgtttggactattgtttatcaacgttgaaacaagacgtgcgatatactttattccgatttggtttatactattaggatttatgtacttaagatataaacgtatcgctgctaaatcaaataactaaaaacaagttttacccctgttgaatatattaaagttcaacaggggtttttatatgcaacttataatattaaattgcgtacttgcctcaatactttttctcatctattgaataatgtatcattttagagatacatccatacttctattttataataactttccaaattaatatgagtgaaagtttaaaggtgaaaatgtacatgtataaaagatataaacatttatatagattgctattcatacattatcattatcaaatatcctattaattacgtcataaaataccagatgaaccaaaaaacgcctttccattgttgataaatggaaagacgtttttttataaattatagtacgtttgcatatccttcaaagattttaccttgagcagcatcaatcgtaactaacatgttattgcttatgtttttaacagctttttctacacctacaactgttggaatacctttttctaaaccaacaattgcacttggtgatgtaattccattttcttctgtaattaagcctaacgctttttctacataaggtacaaacgtttcatcgattgagtttgtaacgataactttgtcagataaatctttaccttctaaatctttaacagtttcagcaactaacgtagtaccaacaactgatccacgtccaataccttgaccattagcaatttcgtcaccaactaggtggattttcatcatattagtagttccagtttcaccagttggtacaccagcagtaataatgattaaatcaccattagttactctaccagtttcaacagctgttgcaactgcattgtttaacaatgcatctgtactcttacgtccttttttaactacaggttgaacaccccaaacaattgaacattgacgtgcagtttcttcacttggagtcactgcaataatgtctgaatgcggacgatatttagagatagtacgtgccgttgaaccactttcagtagcagctacaattgctttaacatttaagtttaaagctgtatgtgcaaccgaaataccgatagcattcactaatgaagtttcaactaatttagtacgatctgacaataactttttgtaatcttgggctgcttcagctgatacagcaatatttctcattgttttaacagcttcttcaggatataaaccagcagcagtttcaccagataacattactgcatctgtaccatcatagattgcgttggcaacgtcactagcttctgcacgtgtagcacgtgggttacgttgcatagaatctaacatttgtgtagctgtaataactggtttacctaatttgttacattgtctgattaaatctttttgaaccattggtactttttcaggtggaatttcaacacccatgtcaccacgtgcaaccattaaaccatcagacacttcaagaatttcctcaatattatcaataccttcttggttttcaattttagggaatactgaaatgttagctttttgttcttctaaaatttcacgaatttctaaaacatcactaggacgacgtacgaaacttgctgcaatgaagtcaacattttctttaataccgaaacggatatcttcagcatctttttctgtaataccaggtaaactaactcttacaccaggtaagttaacaccttttttgtttttaagctcaccagagtttaaaatatcacatttaacttcttttttagcatggtcaatatctttaacttgtaattcaattaagccatcatcaagtaaaatgtatgaacctacttgaacatcgttaattaagttttcataagttacagagaacttttcaggtgttccttcaacttcattcatgctaacaataacttcgttaccacgttcaagttcaatgataccgtctttcatattatgcgtacgaatttctggacctttcgtatctaataaaattgctacaattttgtctaatcttttagctactttacgaattgtatcaattctacctttatgctcttcatgactaccatgtgaaaagtttaatcgtgcaacgttcataccagcattgattaatttctcaatcatttcttctgattctgaagctggtccaattgtacatacaattttagtttttctcattttataattcctcctgaaatcttatatagataacttgttagcaagttcatatagactataatcaaatttatgatctttaccatcaaaaatttcatcaaaagatgttgctacaattttattgttcttaattccaacacctttagctgtttcaccttgcattaataagtctaccgcatatccacctaatcgtgatgctaaaactctatccgcacctgttgggctaccaccacgttgaacgtgacctaacacagacactctattatcaacattgatgtattgtgataattctttttgacaatcttgcgcagtcatacaaccttctgctacaagaacgattgagtgtttcttaccacgtttaataccttgttcaattttatcagctatttctttaatatctgttttcacttctggaactacaattgtctcagcaccaactgataatccagcccataatgctagatctccacaatcacggcccattgcttcaatgataaatgttcgtgcgtgacttgacgcagtatctctaattttgtcgactaagccaataatcgtatttaatgctgtgtcaaatccaattgtaaaatcagtaccattgatatcattgtcaatcgtaccaggaataccgatagtttgaatttctttgcattcctcactgatgcgttgtgcaccgcgataactaccgtcaccaccaataactacaaggccctcaatccctcttttacgtaagttttcgattgcaactttacgtacttcttgctccttaaactctggacatcttgctgaatacaagaatgtacctccacgctgaatcgtatccccaactgatcctaattcaagtttatgaatatcatcatttaacaatccttggtaaccatgatacacaccataaacttcaatttcattgtaaattgctgtacgaacaactgctcttacggcagcattcattccaggtgaatctccaccactagttaaaactgcaattttcttcatgacgacatacctttctataactgatttatctttaactctaaattaccacaaattgatatgtcattccatcaaaactaatgtattgaattgatgtaaacgttttaaatattgaattttattttaacttaattaaaaaaagattagtagccacaattttgactactaatcttagttaaaattcagtatctaaatattgaattattgttttaatgtacttcaatttatggtaaaacccagtaacgatttaacataaaaatgcttaagttgattattctatataagaaccgatatttctgaatttttcaaaccgatcattagcaatttcatcacgtgataatgactcaagtgaatctaattgttcaacaaacgctgatttaatagctaaagcttgttgttcaatatctttatgtgcaccgccaagtggttcagaaatgacatcatctataatacctaattgcttaatatcatgggcagtaattttcattgtttcagctgcaattttagccaaattactgtctttccataataatgccgctgcaccttcaggagatataacagagtaagtactattctctaacatcaatactttattggcaataccaatacctagggcacctccactgccaccttcaccaatgacaatcgcaataactggtacttttagtgaagccatctcaatcaaatttgttgcaatagattcactttgtccacgttcttcagcagctttaccaggatatgcaccttttgtatctataaatgtaaagattggacgattgaatttttcagcttgtttcattaaacgtagtgcttttcgataaccttctggatgagccataccaaaatttcgataaatattatcttttgtatcttttccacgttgttgtccaataaccgtaacagcacgaccatttaaaaagccaataccaccaatcattgctggatcatctctaaaattacgatcaccatgtagttccataaacgaatcaaagatatatggaatataatccagggtcgtaggtctttcttgcaaacgcgcaatttgcacacgatcccatggttttagatttgtatatatttttttagtttctcgttccaatgacgcttcaagcatgtcaatttcttcttgtaaatccacatcatttttatcttgagattcttttaaagattcaattttatttcgaatttcaaaaagtggtttttcaaaatctaacattatttagtcacctcttgatggatttttagaatttcagacaatgtttgacgcatatcattacgatgtacaactttatccaattgtccatgctctaataaaaattctgcagtttggaaatcatctggcaatttttcgtttattgtctgttcaataactcgacgacctgcaaaacctatcaatgcttttggctcacttagatttatatcaccaactgatgcaaaacttgcagatacaccaccagtagttggatgtgttaaatatgatatatataatagtccagcgtcagaatgacgttttaaagatacactggttttacccatttgcatcaaggaaataataccttcttgcatacgtgcgccaccacttgcagagaaaagaataaatggtaaacggttctcagtgcagtaatcaatgatgcgacatatcttttcaccaataaccgatcccatacttcccattctaaaacgtgaatccatgacagcaacgccaaatttcataccatctagttgcgctgtaccagtcactactgcttctttaagacctgtcttttgttggtccttttcaattttttctaaataacttggaaaatctaatggattcgcagaggtcattcccttatcgaattctgtaaatgatccttcatcagaaattgcttctatacgtttatacgcagttaaagcaatatgatgatcacaattaaagcacacatttaaattttcagctaattcttttgtgtacataattttcttacactttggacacttagtcataatacctgcaggcacatcattatttttagagtcttgtactgtaagatatttctttttctttgttcgattaaaaaaatctttaaacataggaaaacctccaaataacctctgttctaaccatttagagccttaaactgaacttgaccagttaaaaacgggtttaaatttatttgatttatattcgtttgactgttgaatgtttatcataaactttcattttcatcattttaatgactctttattgctaacttttaagcactttaattaaacgttaattatttttattgtaaatctgtaagtttcattgttttatcatacacatcttgcggatcaacttcaatcctagctactccagattccattgccgctttagcaacattacgagcaactgatggcgctacacgtttatcaaacggtcctgggatacagtagtcttcatttaattcagaactatcaattaaatcagcaatcgcttctacagctgcttttttcatttcttcatttatatgtgtagcttcaacctctaatgcacctctaaaaataccagggaaagctaatacattattaatttggttaggatagtctgaacgtcctgtaccaacaacgcgtgcacctgctgctttggcatcatcaggtattatttcaggatttggattagccattgcaaatataattggattatctgccatactcttaaccatatcttgtgacagcgcattagctacagaaactccaataaatacatctgcgtcttttacgacttcttctagagacccttcaatcttgtctttatttgtccacttagctacaacatctttcgtaggattcataccatatgaacgtccttcaaaaattgcgcctcttgagtcacacataaccatatttcttacaccatacgcgtatagtaatttaacaatggctattcctgctgcaccagcaccatttagtacaacttttattttagcaatatctttgttaacaactctcaatgcatttaccaaacctgccattgttacaattgctgtaccatgttgatcgtcatggaataccggaatattagtttcttttttcaatcgttcttcaatttcaaaacaacgtggtgccgaaatatcctctaaattaataccaccataattaggttctaacaatttaactgttttaatgatttcttcggtatcagttgtatttaacgcaataggcaccccattgataccagcgaagcttttgaataatactgctttaccttccattacaggaatacttgcttcaggtccaatgttacctaaacctaataccgctgttccatcagtaataactgcaactgtatttcctttaattgtgtaatcatatacttttcttttgtcttcatatatatctttacacggttcagcaacgccaggtgagtatgctaaacttaattcttctttattagtaacttttacatttggtttaacttctaatttaccttgattacgtttgtgcatttccaatgcttcatctcttaatgacatgaaatcagcccctaattcaatatttatttttaaaaaataacttggataaaacgcattacattataaaagtaaaaatattgggtaaatctgaatgagtaagaacttatagttttaattatgtaacacaaatagcgataaacgataataaaataatatttataaagatacattaaaccatactatctaaagatatacctttaattattataatggatagcaaaaccaatatatcaaaaagttattattttttctcaagatatatcgacaaaattctttactcaatttatgtatactgctttttgtgctaattattcttatggattaatcaataatgtaaagtgaaactcataaaaataataagcataaaaaactaatataaacgtaaactgatggttaaaaaatatctaaccatcagtttactatatcataatttattagttgataaaagttatataagcctaatatcactagggttaaaggattgtataaaattattaaacatactatctttttgattaatatagcctaaagtagtcatttgtttaatcgtttcatcataaaaggataacacaacatcattagcattctctttcgtagctttaatcatctcttcaaacatatctatttgtgatttatttctaattataatttgtttggcaaatgctaatttttgttcttcaaaagtggctaatgtctgaatctcatttataattaattgacgttgttgctttctaaggtcaaatttcccgctaactataaataagtcattatgtgataacaactcttcgtactttttaaactgattagggaaaatcacaccatctaaagtttcgatgccatcatttaatgtgacgaatgccatattttgaccatttttagttcggatttgtttaactttatcaaactgtactaatataggcttattattctgcgcgttactcaatttaaatatcgttaaatattgtttggcaacaaacttcttatctactgggtgttgcgaaacataaaatcctaaatattctttttcatactgactaataagtgcatcaggcaattcttctttatcttcatacatctgttttggcgttaaaatatcaaataaaaaaccatcttgttcaatgtttaaatcaccatccaacacttgatcaatagcttgcaacaacgttgaacgtgttttaccaaaagcatcaaacgcgcccactaaaatcagtgcttcaagtaactttctcgttttgactctcttcggtatacgtctagcaaaatcaaagaaatctttaaatttgccgttctgataacgttcttcaacaatcactttcacactttgataacctacacctttaattgtaccaattgataaataaatgccttcttgggaaggtttataaaaccaatgactttcgttaatgttcggtggcaatatagtgataccttgtttttttgcttcttctatcatttgagcagttttcttctcacttccaataacattacttaaaatatttgcgtaaaaataatttggataatggacttttaaaaagctcataatgtatgcaattttagaatagctgacagcatgtgctctaggaaaaccatagtcagcaaatttcagaatcaaatcaaatatttgcttactaatatcttcgtgatagccattctgctttgcaccttctataaaatgttgacgctcactttcaagaacagctctgttctttttactcattgctcttcttaaaatatccgcttcaccataactgaagtttgcaaaagtgctcgctatttgcataatttgttcttgataaataataacaccgtaagtattttttaatataggttctaaatggggatgtaaatattgaactttgcttggatcatgtcttcttgtaatgtaagttggaatttcttccattggacctggtctatacaaagaagttacagcaacaatatcctcaaagtgttccggctttaatttttttaatacacttcttacaccgtcagactctaattggaatatgccagtcgtatctccttgcgacaacaattcaaacactttttgatcatcaaatggaattttttcaatatcaatattaatacctaaatcttttttgacttgagtcaaaatttgatggataattgataaatttcgtaaccctagaaaatctatttttaataacccaattcgttcggcttcagtcattgtccattgcgttaataatcctgtatcccctttcgttaaaggggcatattcatataatggatggtcattaataataattcctgccgcatgtgtagatgtatgtcttggtaaaccttctaactttttacaaatactgaaccagcgttcatgtcgatggtttcgatgtacaaattttttaaaatcgtcaatttgatatgcttcatcaagtgtaattcctaatttatgtgggattaaacttgaaatttcatttaatgtaacttcatcaaaccccataattcgtccaacgtctctagcaaccgctcttgcaagtagatgaccgaaagtcacaattccagatacatgtaactcgccatatttttcttggacgtactgaatgaccttttctcggcgtgtatcttcaaagtcaatatctatatcaggcattgttacacgttctgggtttaaaaaacgttcaaataatagattgaatttaatcggatcaatcgttgtaattcccaataaataactgaccagagaccctgcagatgaaccacgacctggtcctaccatcacatcattggttttcgcataatggattaaatcacttactattaagaaataatcttcaaaacccatattagtaataactttatactcatatttcaatcgctctaaatagacgtcataattcagttctaattttttcaattgtgtaactaagacacgccacaaatattttttagctgattcatcattaggtgcctgatattgaggaagtagagattgatgatattttaattctgcatcacacttttgagctatcctgtcagcttgtgtgaaatattctggattcacatcaagttgttgaatttcattttcagttaaaaaatgtgcaccaaaatcttcttgatcatgaattaagtctaattttgtattatctcttatcgctgcgagtgcagaaattgtatctgcatcatgtcgtgtttgataacatacatcttgaatccatacgtgctttataccctgaactaaaacacttcgatgatctaaatacgtatcttcatgcgaatcaaaaacttgaacaatgtcacgatgttcgtctgcaacatttttaaaaatgataatcatattgttagaaaatcgctttaataattcaaacgacacatgttctaatgcattcatttttatttccgatgatagttgatataaatccttcagaccattattatcttttgctagaacaactgtttcgactgtatttaatccatttgtcacgtatattgtcataccaaaaatcggctttatattattggcaatacatgtatcataaaatttaggaaaaccatacaatacattggtgtcagttatggcaagtgcatcaacattttcagacacagcaagtcttacggcatcttctatttttaagcttgaatttaacaaatcataagccgtatgaatatttaaatatgccaccatgattgaatggcccctttctattagttaagtttcgtgcgcaaagctttagcaagttgctcaaattcatcccagctgttcactgaaactcctgacgcattcggatgaccaccgccaccaaaatcttgcgcaatatcattaataatcaattgccctttagagcgtaagcgacatcttatttcactaccctcatcaactgcaaacacccatattttcaaacctttgatgtcagcaattgtattaacaaactgagatgcttcatttggctgaataccgaattgcttcaatacatcttcagttattttaacttgacagaatccgtcatccataagttcgaaatgttgtaaaacataaccttgaaacggcaacatttttggatccttttccatcattttatttaaaagcgcattatgatcaatatcatgcccaattaactttccagcaatttccatagtatgttctgaggtattgttaaaaaggaatcgcccagtatcaccgacgataccaaggtataaaacactcgcgatatctttattaacaattgcttcatcattaaaatgtgagattaaatcataaatgatttcacttgtagatgacgcgttcgtattaactagattaatatcaccatactgatcaactgcaggatgatgatctattttaataagtttacgacctgtactataacgttcatcgtcaattcgtggagcattggcagtatcacatacaattacaagcgcatcttgatatgttttatcatcaatgttatctaactctccaataaaacttaatgatgattccgcttcacccactgcaaaaacttgcttttgcggaaatttctgctgaatatagtattttaaaccaagttgtgaaccatatgcatcaggatctggtctaacatgtctgtgtataataattgtatcgttgtcttcaatacatttcataatttcattcatcgtactaatcattttcattctcccttttcaagaaaaattgcttaatttaagcattagtctatatcaaaatatctaaattataaaaattgttctaccatattaaactatttgcccgatttaattatttagatatatatttttttcatactatttagttcaggggccccaacatagagaatttcgaaaagaaattctacaaacaatgcaagttggggtgggggcccaacatagaaggtgacgtaatgtcagcttactttaatgtgcaagttgggctggggccccaacatagagaaattggatttccaatttctacagacaatgcaagttgggctccaacatttgtgtgaaatctatcttatgcctattttctctgctaagttcctatacttcgtcaaacatttggcatatcacgagagcgctcgctactttgtcgttttgactatgcatgttcacttctattttggcgaagtttcttccgacgtctagtatgccaaagcgcactgttatatgtgattcaataggtactgttttaatatacacgatatttaagttctctatcataacattaccttttttaaatttacgcatttcatattgtattgtttcttctataatacttacaaatgctgctttacttactgttccgtagtgattgattaacagtggtgaaacttctactgtaattccatcttgattcattgttatatatttggcgatttgatcgttaattgtttcacccatttgaggttgtcttcctaaaagttgcatagacttcaaaacatcttgtctattaatcacacccactgtctttttattactcgaaacgacaggaatcaattcaataccttcccaaatcatcatatgcgcacaacttgctactgtactcatagcatttacataaataggatttcgcgtcatcactttatctatttcgtcgtcgtccttcgtattaatcatctctcgacttgttacaatacctactaatttataagactcattgactaccggaaatcttgtatggccagtttgattcgccatacgcttataatctgctattttcatcgtatcaaacagcacagataaatcatctaatggcgtcattatatcttgaactattaagatatcttttcgtattttctgattaaaaagtgctttgttgataatatttgcaactaggaatgtatcataacttgatgatagaacaggtaaatcatgttcattcgcaaaatcaataactttattagatggcttaaatccaccagtaattaatatagccgttcctctttttaaagcttcaatctgtacatcttcgcgatttccgacaatcaataatgtctttggaccaatatactttaaaatgtctttgagttccattgctccaattgcaaatttagataccatcttagtgatacctttgttgccacctaacacttggccatcaataatattgacaatttcattaaaagttaaatgttcaatttcattacgattacgtttttcgattcgaaccgtaccaacacgatctatcgttgcgaccatgcccattttatcagcatctttaattgcacgatatgctgtcccttcagatacgtttaaaaatttagcgattttacgcaccgaaattttagagcctatagataacgattcaatataatctaaaatttgttcatgttttgtcattctttacctcttcttttcgaacagtattaactacattataactttattttggataaaaagcattgaagtgaaatgaaataatgatcgtttcacctattttattttttgaaaatatacaacaaacacaaagatcacaaaatctttaattttaaatggaaaaatccattattatttattagaatgtaagtgaggagggatgtactaatgtataaaaatatattacttggtgtagacactcagttaaaaaatgaaaaagcactaaaagaagtgtctaaattagctggcgaaggtacagtcgtaacagttttaaacgcaatcagcgaacaagatgctcaagcatcaattaaagcaggtgttcatttaaacaaacttactgaagaacgaagcaagcgattagaaaaaacacgcaaagctttagaagattatggtattgattatgaccaaataattgttcgtggtaatgcaaaagaagaactattaaaacatgctaatagcggtaaatacgaaattgttgttttaagtaaccgtaaagcagaagacaaaaagaaatttgtacttggaagtgtcagccacaaagtagcaaaacgtgcgactatccctgtattaatcgttaaataaaatttttatccagaatcacaaataatctttcaatcatgatgcagtctcaaacgactgagtaaacacaagaaatgattatgactgtggtcctggtttttttatattgttcactatttaaccaacaacttgtatcaaacaaaaccattttgaaccaaaaacataatcaatatcataacccagcaggagttgactatggggcccccaacatagaagctgacggaaaagtcagcttacattaatgtgcaagttggggtggggtcccaacatggagaatttcgaaaagaaattctacagacaatgcaagttgggctggggtcccaacatggaagctgacgaaaaagtcagcttactataatgtgcaagttggggtgggccccaacacagaagctgacgaaaaagtcagcttacaatatcagtagaatataaaaacacccactaaaaatatgcagacgataacttccacatagattagcgaggtgtttttagtgtaaaatctatattctatttaaaactgaacagattcacctggttttaaaatttgcacgtcccctacattaacagcatctttaaattgttgtggatcttgttcgattaatgggaatgtatcataatgaatcggtacagaaattttgggtttaataaattcattaatagcataacttgcatcatcaatacccatcgtaaaattatctccaattggtacaaaacatacatcaactggatgacgtttcgcaataagtgacatgtcactaaacagacctgtatcaccagtatgataaattgtttttccttcaacttcaaacacgatacccattggcatacctaaataaactggaataccattttcatgtgtaaaacttgaactatgaaatgcttgaacaaatttaacgcttccaaaatcaaagtttgctttaccaccaatattcataccatgaacattttcaacaccgtgatatgaagaaagatagtcagccatttctgcacttccaattactgttgctcctgttttctttgctagttccacaacatcaccaaaatgatcaaaatgaccgtgcgttaaaacgatatagtccacctgcactgtttcaatattcaaatcacacttagggttatttgaaataaacggatctacgataacctttttgttgttcccttctaaataaatcgttgattgaccgtgaaatgataacttcatttgagcatcctcctatcaattgctatataaatttagtacccttttgcctcttaattataacaaattctcaaattttaaaaattgaaaatctaattaatgtattagcttgattttgaaatataataataattagcataaaatgtaagtaatattatgttgaggagtgtttataaaatgacaaaaatatcaaaaataatagacgaactgaacaatcaacaagctgatgcagcatggattacaacaccgttgaatgtatattattttactggataccgtagcgaaccccatgaaagattatttgcattattgattaagaaagatggtaaacaagtactattttgtccaaaaatggaagtcgaagaagtcaaagcatcacctttcacaggtgaaatcgttggatatttagacactgaaaatcctttttcactttatcctcaaacaatcaataaattactaattgaaagcgagcacttaacagtagcacgccaaaaacaattaatctctggtttcaatgtcaattcattcggagatgttgatttaacaatcaaacaattgagaaatattaaatctgaagatgaaattaacaaaatacgtaaagctgctgagttagcagataagtgtatcgaaataggtgtttcttatttaaaagaaggtgtgactgaacgtgaagtagtcaaccatattgagcaaacaatcaaacaatatggcgtcaatgaaatgagttttgatacgatggttttatttggagatcatgccgcatcacctcatggcacaccaggagatcgcagattaaaaagcaatgagtatgtactatttgatttaggtgtaatttatgagcattattgtagcgatatgacacgtaccattaaatttggtgaacctagccaagaagcacaagaaatttataatattgtattagaagcagaaacatctgcaatccaagcaattaaacctggaatacctttaaaagatatcgatcatatcgctagaaacattatttcagaaaaaggttatggtgaatatttccctcatcgcttaggtcatggtctaggattacaggaacatgaatatcaagatgtttcaagtactaattctaatttgttagaagctggcatggttattacaatcgaaccaggtatttatgtaccaggtgttgcaggtgtaagaattgaagatgacatacttgtcactaatgaaggatacgaagtattaacacattatgaaaaataaggaatgggacaaaaatgaaaagcttgttacaagcgtattctcattcagtcaaacactgccaatataacattgtagcgcctaggacataaatttttgtccaagtctaaatgcaatatgtaacaaacaagctagaaacacatatgcaggtatgttcatcagtaacatttaatgaatcagatcaatatcattcatgttcgatgatttcttcgcattgtttctagctttaatttatcattatttaattttaataaccaaggagatgataacgtcattctttagtacgctgtaatccattcccttttcattaaattcaaattataattgtaatgcttcttctacagatttatattccatttcaaatgcctctgcaacgcctttattggttacatgacctttgtaagtatttaaacctaatgataatggttgatttgatttaaatgcttctctataccctttattagctagcatgagcgcataaggtagcgtagcattatttaaagctaacgtcgaagtacgcggtactgcacccggcatatttgcaactgcataatgaaccacaccatgtttgatatatgtaggattatcatgtgtcgtaattttatcagttgtttcaaaaataccgccttgatcaatagcaatgtcaataataactgacccatttttcatttgtttaatcatgtcttctgttacaagtcttggcgctttagcacctggaattaaaactgcacctattactaaatcactttgtttaacatacaactcaatattcaacggatttgacataattgtatgtacacgtccaccgaataaatcatctaattgttgtaaacgctttggattaacatctaaaatcgtaacatctgcacctagtcctagtgcaattttagctgcatttgttcctgcttgaccaccaccgataatagttactttacctttaggtactcctggaacgccaccaagtagaattcccataccaccattgagtttttgtaggaactctgcgccaacttgagctgacattcttcctgctacctcactcattggtgataacaatggtaaagatcggtctggtaactgcacagtctcatatgcaatactaattacttttctatctatcaaagcttgtgttaatttttcttcatttgctaaatgaagataagtaaataatactagtccttctttaaaatatggatattcagattcaagtggttctttaactttaataaccatatccacatcccaaacttttgcttgttcagcaacaatctcagcacctgcttctttgtaatctacatcttcaaagaacgatcctgaacccgcatttgtttccactaaaacagtatgcccactttctactaaagcgtgtacaccacttggtgataaaccaacacgattttcattatttttaatctcccttggtataccaattttcataccatccacctccataatcatcttaacgcgaacattttgaaagcgcaatcaaaaatccacaaaattgtaaaggttattacactgacttttccgaaaattgtggtaaaatataattaagaaagaacaaggaggcacttactatgattacttacaaaaatattttaatcgcagttgacggttcacatgaagcggaatgggcatttaacagagcagttggtgttgcaaaacgtaacgatgcgaagttaacaattgtgaatgtaattgattcaagaacatattcttcttatgaagtttatgatgctcaatttactgaaaaatctaagcattttgcagaagaattattaaatggttataaagaagtagctactaacgctggtgttaaagatgtagaaacgcgtctagagtttggctctcctaaatctatcattcctaaaaagcttgcacatgaaattaatgcagacttgattatgagtggtacatcaggcttaaatgccgtggaaagatttattgttggttctgtatcagaatctatcgttcgtcatgcaccatgcgacgtgttagttgttcgtactgaagagttaccagcagacttccaaccacaagttgcaacaactcaattacgtgaaaaatatcaaaattaaatatagatgatcattagataactacttgatcattatgaaccaagtgcaactttctgcacttggttttttattgtttataaataaaactcacttaataatgttgtcataatcttcttcgactacttaatttttttaagatattcgtgaaaaaagacattacactagttaattttcaaacaatacaaaaagcgtctacctcctacttataattgtagcggagatagacgcttaatatttattaaaaaattattttagaccaccgtatgtcataacatcacgagcaatcatactttcttcgtcagtcggtataacgacaactttaacaggtgaatgcggatagttaataaatccttctttaccacgttgtaagttttcatttttcttaggatcccagtaaactcccataaattctaaaccttcaagaacttttgcacgaatttccactgaattttcaccaatacctgcagtaaatacgattacatcaacgccatgcattcttgcagcgtatgatccaatatatttgtggattttagaagcaaagacatctaaagccatttgagaacgtgctttgcctgattcagcttcttcagataagtcacgtaaatcacttgatgtacctgataatcctaataaaccagattctttgtttaagatttctaatacttgttcagcagttttgccagttttttccataataaatggaattaaagcagggtcaatattacctgaacgcgtacccattgttacacctgcaagtggtgtgaagcccattgatgtatcaattgatttaccgccatcgatagctgcgattgatgcaccgttaccaatatgacaagagataatgcgtaaatcttcaattggtttatctaacatttctgccgctctttgtgacacaaatttatgacttgtaccatggaagccatacttacgaataccgtaatctttataataatgatatggcaagctatataaatatgctttttcaggcattgtttgatggaatgctgtatcaaaaatcgccacatgagggatattcggtaataatttacggaaagcacgaatacccattaagttagctgggttgtgaagcggtgctaattcgcttaattcttcaatttctttttcaacttcatcagtaattgctgctgattcagggaatttttcaccaccatgtacaacacggtgaccagttccatcgatatcgttaatatcattaatgatattatgttttttaaatgcgtctaacatgatatcaactgcttcaacatgatccttgatatcttgtactgttttaactttttccccgtctacttcaattgtaaaaattgaatcttttaatccgattctttctactaatccctttgttactaattcctcttcaggcattctgattaattgaaactttaatgatgaactaccagcgttgatagccaagattaattttgacataagtaatgatcctccatcgtttgctttttatactatttcatttttcattttatcattcatacagttttatgactatactattacagattattttttaggacgatttgtgtccatccactgatttaactctgtcataaatccttgaaattgtgaaggatttttgaaatcaggaatatttgccaataatacttcaactggctttgtttcacccgattttttcttttgtaaaattaatatagattttcgcgctttttcatttttaaataaagttggtggtaaatttaaaaatgcttgcatctctgtctctgttgcaatatatttttcaagctgttttacatgttcacctgtaaaaatattacttggtaccactagaaaggcatatccagcatcttttaatgcatttattgcttgttctattaataaataatgtgaataactatgtccttcttcgaaacctagcttaaagtccctgcttctttcatcaattggataatagcctactggaaaatcaccaataacgatatctgcttcttctaacggtagtggcataatggcatcttgaggatacacatcgaaaggaatttctaagaagtttgctaaatgtacactaacacgtgataaaactggatcaacttcaattaaatgatgcataaccgcaatttcaggtaacacttcttttacagtagcacttaaatgaccagcaccacttgcaatatcaacaatatgtaattcttcttggttgttcataaatcgctcaactaaaaatcctaatatcaatccaattgaatctggtgtaatttgatgatttgcttgtatcttttcttcctgcattaaacttaaatatgcaaattggaatgctttacgtcgatcttgtaacgtcgattgttctaacaatcctctttcatttgtataaacttgttccattgctagcccaagattttcaataaaactttggccattttcattatttaatgttttagctttttcatctaatgtatgaaacaagcgttccataattgtttgttgttctgccatattcgtccctctccaataaaaagtgcccataggtcttagcaatcatagaaaacaattctattttaatgctgttgacaacgatggacacgatgtatacattttaagatttatctctttaatgattaaatatttttgtatgcagctaaagcagcatcaaaatctgggaaatcagtaccttcactaacgatttctttataaacaactttattatctgcatctaatacaaatactgcacgagctaataagcgaagctcttccataacaacgccatagttttcaccaaatgataagtcacggtggtcacttaatgtaatgacattgtctaaacctgctgaagcgcaccatcttttttgtgcgaatggtaagtctgctgagattgtaagcacaatcccctcttctttagaagcttcagagttgaatttgcgagtctgctgatcacaaacacctgtatcaattgatggtaccacactaattaatttctttttaccagcataatctgctaatgttacttgatttaagtcattatctaacactgtaaaatcaggtgcaaaatcaccttcattaattagttgaccttttaagtggattggtccacctttgaatgttatttcagtcatatacttgacctcctgcattttaaaattctaactacatcatacgacaatttatggtttgattacaattttcatgctttaatcaaaagcaaatttaattttatacaaattgttgaatataatcaaaagcattttttaaaattaaaatcgcagtaataataataaataatacttttacatagccaacaccttgtttaatagcaaaatgagccccagcatatgacccaacaatcatactcgcagccataactaaacctattacataatctacttgtcctaataccataaataatacaagcgcacctatattagaagcaaaattcaaaactttagcatttcctgcagcgcttaaaaaatcaaaaccaaagattaacaatacaaaaagcataaatgaacctgttcctccacctacaaatccatcataaaagccgattaaaataaaaagtgctgcaaatagtatggctttcttaaatgtaaattgagtaaacgtacgtgtattgccccaatcttttttaagtaatgtgaaaataaacaccgacgaaagtgcaataatgattaaaggtttcaatatttgtgacggaaccatggttgcaatatatgcgccacatgcagatgccaaaaatacaaaaccaaataatttggcaacaacatataagtccactttaccggaccttataaactttatcgcactagttaaagaaccaaatgaacttgccaatttatttgtacctaaagccacagatggtggtagaccgattgctaataatgctggcgtagaaattaaaccgccacctcctacaaccgaatctataaacgccgcgataaaaccaaataaaattatgattataatcatcgttaaattcaaatccatagtttaacatccccttatgtttaaatttactctaggattttatttataaaaagtcgtttattaattggtttgtttgctgttctttaatagttttataatcacttgttatttcaagtgtttcaatattttcaacagcacgattaatcatctcttcaaaatcaaagacactttcgtattgaactaccttatcaaagtttggttcggttactggatttttaggggtgaaaattgtacaacaatcttcaaatggttgaatagatgtttcaaatgtaccaatttctttcgatttaataataatttcttctttatcgtaagttaataaaggacgtaatacaggggtagaagttacattattaattgcatacatgctatgaagtgtttgactggcaacttggcctagattttcaccattaacgatggcataagcgcctatttgatgtactaatttatcagcaacacgcatcatcatacgtctcgttgaagtcattgtatatcttggatgtacaactttatttacctgtttttgcaattctgtaaatggtacaatatgcaatttaattggtccaacacgttcagctaaaatacgtgtcaattcaataactttttcttttgcttgatcacttgtaaatggtggactatggaaatgaatcgcttcaattgttacgccacgtctcatcacttccatcccagcaactggtgagtctataccgcctgaaagcattagtaacgtcttaccaccagtaccaactggtaatccgcctgcgccctgaacaacttcttcatacatataaattgcatctaatctaacttccactcgaatttcatgatctggacgtttaacattcactgaaatattgtcgaagtgcttcaatactgcaccacccaattcacgctgtaattcatacgtatccattggataatttttgtcagcacgctttacatcaattttaaatgtgctgttttcttcaaattgctgcgcaaatttaattgccgttgcactcattgcctctaatgttttttctacttttaataccggactaatagatttaataccgaaaatttttgataatcgatatgttatttcatttatatctgcatggtcttcaagttcaatatacatacgatctcgtttgcctttaacgacaaacccatcaagtccttttaatgacttatttacattatttcttaattgattcacaaatttctttctatttgaaccttttagtgttaattccccgtatctaacaagcaagtgatcatacttcattattttagcaactccttaatttcctcatatattatcgtaaatgtctctttaaattttgttatatcttctttcgtcgtcatagcaccaaatgacagtcgaatactgccttcaatcgctttatctgataatcccattgcagttaatacttcatttagtttattacgttttgatgagcaagcacttgttgtagaaatcataatatcgtattttgaaaatgcattgactaacacttcaccttttacaccaggaaaactaacgtttaaaacgaatggtgaacctgaagttgaagaattaatataaactccatgatatttatttaaaaattgacggacgtcattatttaactcagtaacaaatgcattcaatgcttcaaggttttcattagctatcttcatcgctttaaccattgcaatatcatttggcaaattaactgttccacttctaacgccatattcttgaccaccaccatggacagttggttcaacattttgaatgtgatttacaagtaagacgccttgaccttttaaaccattaaacttgtgtccgcttaaactaatactatctacgttattgaaatccattgaaattttgccgaatgcttgaaccgcatctacatgaaaatgtgccttaggataattttttataacatctgccatttgtggaataggctgtatttgtcctgttacattatttacatacatacatgttactaaaccgactttgtctgacattaattctttgaagtgttctaagttaatactgccatcttttgttacatcaacatatttaactttaaagccttcgcgctcttccaaatatctgacaacttctaaaacagacggatgttctaaaacagatgtaattatttctcttgctgtatcaaatttacgataagccacacctttaagcgcgatattgttagattccgttgcaccactagtgaaaacaacatcatatgtcatattagtattgaccatatcatttatttgaacttttgcttgctgtaataattgatctgcttgcaaaccagctttatgcggactattcggattataatacattgattgatttacttttaaataagtatctaacacttcttcaaatgctttcgtcgttgccgcattatctagatatatcaaaataaacacttctctttcattaatcatcaatcttttaaaattgtttttactcaagcattatactattatcacataaaaaataaaggctataacaaaaattaatcatttttccacccattttaataagaattgaactatttcactctatgcatacagctgtggaacgacgcattttcgctacctgcattatttcaacaatcacattgaatgacatttatttttaaacgattgctaatttgaatctccttatcatatatccatataaaaaagaagctagacaacatacagttggctaactcctatcacttcgtaaaatacgattaagtataataaatgctattgcttaataacttcttcttcaatatgtttagtgacacctggctcaacactttcaagagcttgctctgcaatttcaatcgcacgcttatagcgattatttttaaataatcgttcagcttcatttaagctcttatcaacattgccatagtccttacgatatctatttccatattgaattaatttctctgcataaacagcattaacaagaacatcatttgcttcatcttcaaatgtattcatttgaatcacaattttagacactttatcttttaactgtttaacgtgtattggacgttcactaaattgttcgttaacatcacgaacttcatgatcaatttcatttttcatgatgataaacctttcaggaacgcttgttaagttagaagcaagtaatcgacgatacacttcttctttcttcgattgtactcgtaacagattgtcttctgcttctgcttcatcttcacgcaattgaatcaggtgattttgtagcttttcttgtttgtcattaataactgtgacatgatcttctaaatattgtaaattatcctgaacctcgctatatcgtacagcagatttagacatttcttttaaaatatcatcatatacagaaattaaactttgaatttcattttcaaattgacgaacactctgagcatcagattcatttatatagtagttttcacgtacatattcaatttctgtttgcaatgtataattcatgtctttagctttgaataagttatccgtaatgatatcttttgtttcttcgacatcatttttagctttaacttcatgttcaattaaatcatacatgtcatctaacttatcattgatattagctagtttatcattagcttcttctaattctaagcgactaattaatggttcaacgaaactaagctctgtttttaagctttgtaatgtactgtctacttttacgtgatccagatcatacccttcaactttaagatcacggcaaccatattttaaatcttggaattgaccaggtaattctttttgagtttctctaattaattctggtatttcttccatataagatcttagctgtttcatttgttcattcaaggcagctatatggttgtgcgcttgtacataattaccatcagcttttagtacttcatattgctctaaccttggctcgaatttttcaatttcagtttcaagaagacttgctgcctcaccaaattgatgacgatttgctaaaacatcacgtttcatttcacgataatcaaccttacatttgtcatataattcatcattatctttgtataacgcaataatttcatttacatcttctaattgttgctgatagctttgttcgtaactatccatcaactcatttgcatcatcaatttcactttgagatgcgttgaaactaaatttatctaataaagcctcagcattatggattttttcttccacaggagctagatacttatttgtactttctacgttgtcctttttcattgcatcgtatttcgtttttgtttcaccttttaaattcaacttagataattgtgcaaggttttgatcaaaaggtaacgtctcaatttcatttttacgttcgattgctttttcaataatttgtcgtttatttgaacgtaaatagaataatacacctacagcaatcaatataatcacaattattgccaaaatgatatataacaccatatgcttctcctcctaatttatcattactattataacgtaattttgcttaaggataaattataaaatgaatttattgccataatattttcgaaattctatactattataaaatctatgaaaataagaggttttaaatatgacaacaattaacccaacaaactacacattattaaagaaacaagcagcaagccttattgaagatgaacatcacatgattgctattttaagtaacatgtctgccttattaaatgataatctagatcaaattaattgggtcggcttttacttattggaacaaaatgaacttatacttggacctttccaaggacaccccgcttgtgtccacattccaattggaaaaggtgtatgtggtacagccgtttcagaacgtcgtacacaagttgtagcagatgtccatcaattcgaaggacatatcgcttgtgatgctaatagtaagtctgaaattgtcgttccaattttcaaagatgataaaattatcggtgtcttagatatcgatgcgcctataacggatcgatttgatgacaatgacaaggaacatcttgaagcaattgttaaaattattgaaaagcaactcgcataaaaggacatcagcattttcaataaagtgttgacagttagcaggaaaatgttacaataaactttgtgtgaattaacgaaagtagcagttgtatattattgagcgctatgttgttcccaatgtggacgtgtcacgtaactgtcgctataaggtgaagacacataaaacaatatatcttagtaagcatgcaacactcttttttgtttattcataacaacaaaaaagaattaaaggaggagtcttattatggctcgattcagaggttcaaactggaaaaaatctcgtcgtttaggtatctctttaagcggtactggtaaagaattagaaaaacgtccttacgcaccaggacaacatggtccaaaccaacgtaaaaaattatcagaatatggtttacaattacgtgaaaaacaaaaattacgttacttatatggaatgactgaaagacaattccgtaacacatttgacatcgctggtaaaaaattcggtgtacacggtgaaaacttcatgatcttattagcaagtcgtttagacgctgttgtttattcattaggtttagctcgtactcgtcgtcaagcacgtcaattagttaaccacggtcatatcttagtagatggtaaacgtgttgatattccatcttattctgttaaacctggtcaaacaatttcagttcgtgaaaaatctcaaaaattaaacatcatcgttgaatcagttgaaatcaacaatttcgtacctgagtacttaaactttgatgctgacagcttaactggtactttcgtacgtttaccagaacgtagcgaattacctgctgaaattaacgaacaattaatcgttgagtactactcaagataataccgttcaatacaaacacccacaattgtgggtgtttttttatattaatttaaaaatgatagattcaagattatatggagctaccctattttacaatcaacttagaatttacaagtcttatttgttgaattatctataatatttcctcattagtttttaaaattatcaattgcgatatacgaacccttatccctctatcaaataaccattcatcgtcttacttaataaataatttcggatcatctgtaattaatccatctacacccatatgtcttaatttttctccagttttcaatttattaactgtgtatggcaaaacctgtaattgatgatgatgtgcttcatcaacaaattttctggtcactaatgcataattaggattaacataactagcaatttgagcaattcttgaaaagtttggctttttataccaatacttacgtttactacaaagcacacctaattcatatatactacctaatgtgtttaacttttcgatgcattcgatatcaaaagattgtataactacttgtgtcgcatcgactttcttttcttctaaaaatgccagcaatttacattctattcctggatataaattcggactttttaattcaatcaatagctttttatcaaactttaagcataatgaaagtacttcatctaacgtgggtattcgttctcccttaaaagcaacatctttataactaccaaaatcaaatgattttaattgcgataatgtgtaatcagcaatacgccccttaccatccgatgttctatcaattgtttcatcatgtatcacaacaaaatgttggtctttggtcaaatgaacatctatttctaacatagcaacattgagccccattacctctcgataaccgaccattgtattttcaggaaaatcactcggcaatccacgatgcgaaacaatttgtaattcatctttcagtttattcagagtcattgataagtcacctttctgttaaactttgataaactattctaaaattaaattatcacaattatattggaggttaaagcaattgcatcaacatgactttaaagtccaaacttcttggcaaggtggtcgtaacaacgtcgggaacgttaaaggcgacatactttcagagaatatttcaatacctgcttctttaggcggtgttggtattggaacaaatcccgatgaaatgttagtatcagccgcttcatcatgttatatcatctcattagcagctactcttgaacgtgcaaagttcacagatatttcaattgaacaacaatcgattggaacagcttgtttaaataatggaaaattcagtatgtcaaaaattgtgcaccatcctcacattcaaattccaagtgatcaaatagcacaattagaaaagcgattaccaaaattgataacaattgcagataataattgcatgatttcaaatgctgtaagaaataatgtggacataaaaatctatcccatcattcaggccaaataaaatcgttaagtgataacatttgttcgacaatatagcgttatcacttttttaggcttttaaattttcagaaaatttgctaaaatagtgaaatcttatttataggaggcatataaatgtattatcatcaaccgttgttattaacacctggcccaacccctgtacctgatgccattatgagagaaattcaagcacctatggttggtcatcgttctaaagattttgaagacatcgcacaacaagcatttcaaggtctaaagccaatatttgggagtcaaaatgatgtacttatattaacatctagcggtacaagcgtcttagaagctagtatgttgaacattgtaaaccctgaagatcacttcgttgtcattgtttcaggtgcctttggtaaccgatttaaacaaattgcacaaacttattacaaaaatgtacatatttatgacgtaacatggggagaagctgtagatgtcaaagatttcatcaattacctttcaactttaaatgttgaagttaaagcagtatttagtcaatattgcgaaacatctacgacagtactacaccctattcacgagttaggaaatgccatcaatcaatttaatagtaatatttattttgtagttgacggcgtaagttgcattggtgctgttgatgttgacattaacaaagataaaattgatgtacttgtttctggtagtcaaaaagcaattatgttacctccaggattagcttttgtagcgtatagccaccgtgcaaaagaacgattcaaagaagtaactacaccaaaattttatctagacttaaataaatacatttcgtcacaagctgacaattctacaccgttcactccaaatgtgtctttatttagaggtgtaaatgcatacgttgaaaccgtaaaagcagaaggtttcaatcacgtaatagcacgacactatgcaattagaaatgcattaagaagcgccttaaaggcattagatttaactttattagtaaatgataaagatgcatctccaacggttacggcattcaaacctaacacaaatgatgaagtgaaaataatcaaagatgaacttaaaaatcgctttaaaataacaattgctggtggtcaaggccatcttaaaggtcaaattttaagaattggtcatatggggaaaattagtcctttcgatattttatcggtagtatctgctttagaaattattttaactgaacaccgtaaagttaactatatcggtaaaggtatatcaaaatatatggaggttattcatgaagcaatttaatgtactcgttgcagatcccatatcaaaagatggtatcaaagcattattagatcacaaacaattcaaggtagatattcaaactggcttgtccgaagaagcattaatcaaaattataccttcataccatgctttaatcgttcgtagtcaaactacggttactgaaaatatcataaatgctgctgattctttaaaagtaatcgcacgcgccggtgttggtgtagataatattaatattgatgctgcaacattaaaaggtattttagttattaatgccccagatggtaatacgatttcagctactgaacattcactagcaatgttattatcaatggctcgaaatattccgcaagcacaccaatcacttacaaataaagaatggaatcgaaatgcatttaaaggtactgagctttatcataaaacattaggtgtcattggtgctggtagaattggtttaggtgttgctaaacgtgcgcaaagtttcggaatgaaaatactagcttttgacccttacttaacggatgaaaaagcaaaatctttaagcattacgaaagcaacagttgatgagattgcccaacattctgatttcgttacattgcatacaccactaacacctaaaacaaagggcttaattaatgctgacttttttgccaaagcaaaacctagtttgcaaataatcaatgtggcacgtggtggtattattgatgaaaaggccttaataaaagcattagacgaaggacaaattagtcgggcagctatcgatgtgtttgaacatgaacctgcaactgattcgcctcttgttgcacatgataaaattattgttacacctcatttgggtgcttcaacagtcgaagctcaagaaaaagtggcaatttctgtttcaaatgaaatcatcgaaattttaattgatggtactgtaacgcatgcagtgaatgcacctaaaatggacttaagcaatatagatgatactgtaaaatcattcatcaatttaagccaaacagttggtgaattagctattcaattaatgtataatgcaccaagctctattaaaattacttacggtggcgacttagcctctatcgatagtagtttattaacacgtacaattattactcatattttaaaagatgatcttggtcctgaagtcaatattatcaatgctctaatgttgttaaatcaacaacaagtgacattaaatattgaaaataataaagcagagacaggttttagtaactacttagaggtagaactatcaaacgatagcgattccgttaaagttggcgcttctgtctttacaggtttcggtccaagaattgttagaattaataatttttctgtagacttaaagccaaatcaatatcaaattgtgtcatatcataatgataccccgggtatggtaggtaaaactggcgcattgttaggtaaatacaatatcaacattgcatctatgactttaggtagaactgaagcgggcggagatgcgctaatgattttatccgttgatcaacctgtttcaaacaatataattgatgaacttaaacaagttggtgaatacaatcaaattttcacaactgaattgacggtacagtcataaacaatttatgtaaattcaaaatgccaagaagacattggattacttccattgcttcttggcattttttcattattaatttcattgtaactcaatatgaaacctttgtttcaatcattaacttcaagctatgctatcaaacaacaatcaaattacaaattatctagtacacctctaagttcacctaaatgattaataacatagtcggcatgatgcgcttctaactcgcctgcagcatcctttccttttaaacctgttaatgttccaataaacgttgcacctattttttgagcacttaataagtcagctaacgaatcgcctactataaatacgtcatctttatttacaatgttatcttgcttattgatataagatacatatttatcgcgtttattaccatataaagctgcgatataactaaaaggatttggctttcctaatggtcgtgcttgcggatacatattctctgcttctaaaacatcacttgctgttgcaataaaatcagcttcaaaatatggtaacaatcctaaattttcaaatggcacaacagtctcagtataaggacgacctgttgctatacctaattcgaaaccagcaccttttaaatcattcagaagtaccttaacttcatctaccggtctcaaaataatttcttgataaatataacctgtcttaaaagtagttcgtgctattttcttttcaacctcttcatacaacttcgatcctaaataccattcttgataaacttcttgcgctaacgtccataatgcacccttcaaactaaataaattagcatccgaaacatgtaactctgttgttgcaaactcttccaaagcagcataaatattatttttaccaacttttacattatccaaaaattgtaaaggtagttgttcatttaaattaaaacggtctgctaagtttgtgcttatattttgcaacttcaattcgacaggctcatcttgatacatgaatgcctcaatttcatcatgtgataactttttcaaaatatcaattaaatgaatgctaaaaacgataaataacatatcccaatttgaattcagccctagcgattttaatttgtttaaaatcttatctttttgaaaaattcgattcctaatgtcttgtatatcgttatcagtcaaagtttcccaatctatatgtgaatgaagacctaaataacacttatccattaataattcatataccgttaatgcagagacatcaaaacaacgttcttcacttaaaaaaacgccatcaacatcaaataaaattttcttcacaatccccactccatttctgaaaattcagatataaatcattctactatttgactaaaaaaagcgcaaaccctattgaagttagatttgcgctttagctgtttaaattttataaatgtttttcaatttcatcagcaacctgctgtacgtgtgtaccgacaataacttgagttgaatgtttgccattaacagtaacaccaactgcaccggcgtttttaatcttctgttgatcaataatagatgtgtcttttaactctagacgcaaccttgttgcacaattggttaaattaacaatattctcttgtccacctaaaccttctaatatttgtatagcatgattatgatatttactttgtttaatatcattttcaccaggagcaatattatcttttacaactgttggatcaactaattcattttcacctctaccaatcgtgttcaagttaaatacttggattactacacggaaaatcacatagtataggatgaaaaatacaacaccttgaacaagcaacatcaatggatgatttgataccggattaattagtgataacacataatctatcaaacctgcactaaatgaaaatccagctgtccaatggaatgtagctgcgataaataaagataatcctgttaataacgcatgaacaacatataagattggcgcaacaaacataaatgcaaactcaatcggctctgtaacaccaacgaaaaatgctgcaactgaactcgctaggaaccaaccgtaaacttgttttttctgagtagttttagctgtatgatacattgctaacgcagccgctggaataccgaacatcatgattggaaagaatcccgcttgatagcgtcctgtaataccttttatagcatctttgccactttggaatttaccaatatcattaataccaatcgtatcaaaccagaacacactattcagtgcatgatgtaatcctgtaggaattaataatctgttggcaacaccatatatgaaagcaccaaacgatcctaaaccaactatagattcaccaaattttacaatccatgaataaagtagtggccataagaataacaatatgacaactaaaaatgtacagtaaaatgcagtcataattggaactaaacgtttaccactaaaaaatgataatgctaatggtaattctgtttcactaaacttattgtatgcataagctgctattaaacctattacaataccaacaaagacattgccattattcatcttttcaaaagctgaatttatttcagaagctttcattcctaataaaggcgctaatttcattggtgataatacaactgtaactaaaaaatatcctaacgcagctgcaagcgcgactgcaccatcatttttctttgccattcctatagctacaccaattgcaaataaaatacctaattgctctaaaatcgtagtacctaccgtagtaaagaacattgcgattttcggcgccgcatgaagtgcatttaacgtattaccaattccggcaataattgctgcagccggtaaaatggcaactggtaacattaacgaacgccctaaattttggaaaaatttatacattgaatgtcatccttcttaaaataaggtagaaatataaagattactaatgtaactagaataactacttcgatactccgttatagtcacctaggcttactaaccagctatatttctacctcaagttattttataaactttttacaatttcatgcaattcttgttgtaactttgctgttcgtgtttcaatctcttttgtaatgtaatcgatacgctcgtttcgttttaaatctttaggtaaatcgttaatatcgattggtttaccaatatttatgtatgcttgtcctgttaaaagaccatgaatcttagtaggaccaacataagcaacaggtaatattggtgacttacttaacattgcaattgttgaagcaccacgtttcaaaggtgcaccttcttgcgatgtgcgagaacctgttgggaagataccaactgtcttattatctttcaacaaattgattgggcgttttaaagtactaggtcctggattttcacgatctacaggaaatgcatttaaagacgttaaaaatttaccaatccatttatttttgaataattcttttttagccatataatgaatttgattaggatataatgccatacctagcataatgacttcgttataactttcatgcgtacaagttacgacatatttactatctttaggaatattatctttaccgattacgtataatgattttgacattttaactaaaatgaaattcaaaatcttactaatcactgaatacattgtgccacctacttaacttatttgtttataacaactagattttatcactatatttttactagaacaagatagtctgaaaatacatctaaagttgtatagtgtattactagcaataattataaaaaaaagacataattaaagcatatataaatcatataatggaggttaagtatgtcagattttaatcatacagatcattctacaacaaaccatagccaaacacctagatacagaaggcctaaatttccatggtttaaaacagtcatcgttgcattgattgctggaatcattggtgcacttctagtacttggtataggcaaagtattaaatagtacaattttaaataaagatggttcaactgtccagacaacaaataataaaggtggcaatcaattagacggtcaaagcaagaaattcggtaccgttcatgaaatgataaaatctgtctcccctacaattgttggagttattaacatgcaaaaagcatcaagtgtagacgacttattaaaaggcaaatcatctaaaccatctgaagccggagtaggttcaggtgttatctatcaaataaacaacaattcagcttatatcgttacaaacaatcatgttattgatggcgcaaatgaaattagagtccaattacataataaaaaacaagttaaagcgaaattagttggtaaagatgcagtaactgatattgctgtacttaaaattgaaaatacaaaaggtattaaagcgattcaattcgccaactcttcaaaagtacaaactggcgatagcgtattcgcaatgggtaacccattaggattacaatttgctaactctgtaacatctggtatcatttcagcaagtgaacgtactattgacgcagagacaactggtggtaatacaaaagtcagcgttcttcaaacagatgctgctattaacccaggtaactcaggtggcgcattagtagatattaatggtaatttagttggtattaactcaatgaaaattgctgcgacacaagttgaaggtattgggtttgctattccaagtaatgaagttaaagtaacaattgaacaacttgtaaaacatggtaaaatagaccgcccttcgattggtattggtttaattaatttgaaagatatacctgaagaagagcgcgagcaacttcatactgatagcgaagacggtatttatgtcgcaaaagctgatagtgatattgatcttaaaaaaggtgatattattacagaaattgatggcaagaaaattaaagatgatgttgatttaagaagctatttatatgaaaataaaaaacctggtgaatcagtcactgttaccgttatccgtgatggtaaaacaaaagaagttaaagtgaaattaaaacaacaaaaagaacaaccaaaacgtcaaagccgatcagaacgtcaatcacctggccaaggcgatagagatttctttagataatttacagacagaaaagtacattaagagcctactcatattcattcctaagaatgtaatgagtaggctctaatttatttagctatgcaattatatttattgatagttaaccatgaagtattttttcttaccgcgacgaataatcgtaaattcgccatcaattttatcttctggtgctaaagcataattaacatcttgttgtctctcaccattaatataaatcgcaccattgttaacatcttcacgtgcttgtcgtttagaaggagaaatgcctgtttcaataaggacttcaacgatatttgttgtgtcatttgataatgtcacttgaggcacatctttaaatccatcttttaattctttcgctgataatgattttaaatcaccactaaataatgcttgtgaaatacggattgcatcatttaatgcatcttcaccatgaataaatttagttacttcttcagctaatgttttttgagcttcacgtaaatgtggtgcttcatttttagattgttctaagcgatcaatttcttcttttcctaagaaagtaaagtattttaagaatttaattacatcttcgtctgattgattaatccagaattgataaaattcataaggactcgtcttttcagcatctaaccaaacagcacctgactcagatttaccaaatttcttaccatctgatttagttacaagcggaatagttaaaccgtatgcgtctgtttgaccatacatacgacgcattaattcaataccacttgtgatattaccccattgatctgatccacctacttgaatcttacaattcaattctctattcaaatgaccgaaatcaatagcttgtaaaatcgtgtatgtgaattctgtatatgaaataccatgttctaaacgactttggattgaatctttacctaacatgtaattaacgccgacgtgtttaccatagtcacgtaaaaagctaattaatgaaatttgtcctaaccagtctctattattaacaagcactgcaccatggtctgttccaaattcaaaaatattatgcatttgcttactaataccttcgatatttttatctacttgttcttctgtttgtagcacacgttcttctgatttacctgatggatcaccaatcatacctgtaccaccgccaattaaaacgataggacgatgtccatgttcttgaaatcttcttaatgttaaaaatggtagtaagtgaccaatgtgtaagctatctgccgttggatcagcaccgcagtataacgtcacttgttctttatttaataaatcttcaataccttgttcatcagtttgttgataaataagacctctccattttaaatcttcaattaatacattcgtcattattatttcctcctatttataattatttagtgaatacttgttaaaatacattaaaactttttgaacgtaaaaaaacccttacaacaaatatgtaagggcgcgattgcacgttaccaccaaacttaaacataatcataagataatgttcactctattaatgatacgttcattaataaacgtaggacatgttagttataaaggtgtattcatattattaaaaacactagttcacagcgaccactagctctctgatgatttcaaataatattacttgtccttttatcctattctttatgcattttccctaattataattaacgttaaaataaaagtcaaattgcttaaatatggtatactatacgtaatttaggaggttaaagatgacgaatcaagacaacaatcatcaattgaatcatcgtatatatcattttgaaaagatatataaagctatcaaacatgtcattgtttttatatttatgattttcattgccatcgttgctatcgctgtgattgcgatgtctttatattttcatcatttaactaaaacgtccgactcattatcagatgatgctttaataaaaaaagttcgacaaatacctggcgatgaattattagatcataataacaaaaatttgttatatgagtataaccattctcaaaactcactcattataggacctaaaacatcaagtccaaatgtcattaaagcattaacgtcatctgaagacactttattttataaacatgatggcatcttaccaaaggcgattttaagagcaatgatacaagatatttttaatactaatcaaagttcaggtggtagcacaattacacaacaacttgttaaaaatcaagttcttaccaacgaaaaaacatatagtagaaaagcaaatgaacttcgcctagcaattagattagaacacctactctcaaaagatgaaattatatatacgtatttaaatatagttcccttcggtagagattataatggcgctaatatttccggaattgcatccgcttcatatagtttatttggtattccaccaaaagatttatcaattgcacaatctgcataccttatcggtttgttgcaaagcccatatggctatacaccctacgaaaaagatggaacgttaaaatcggataaagatttgaaatatagtattcaaagacaacattatgtattaaagcgtatgttaatcgaagatcaaatcactgaaaaagaatacaacgacgcattaaaatatgatattaaatcacatttattaaatcgaaaaaagcgttaattgatgctcactttttaaagaaaccataacaatgcatccaaatattaaaaacagcagtaagattattttcaattagaaaatttctcactgctgttctttattttaaatactctaatggaaagccattaaaccaatcaatagtttataacttaattgctttcaaattgtctacaaagttaatcatacaaatactatatccagttaattatttaggttcttttctgaatttaggaatgaataaagctaacatacctaataacacatataagccccaccatgtttggcttgaagttgtttctccagtttttggtagcattttagattgactaagtttgttttctttcgatggtgtgccggacttttcttttgttttcactgttttgtctacagttttatgaatatcattcgatggatgttcggttgtttttttgtcagtaactttgtctatattattataattttgtctcacgccatcaagctttgctgcttttccagtatgattatttttatcggtattatgtgctagttgtataactttgccttcatttttattaatgtctttttcagtatcgacattagatgacataccaacgctattatcggcatctttatcgacacccttatcagtgtctttagcaatttgagtatccatttctttgagatcatacttatcgaggtgagtgttatccgacatatctgataaatgatcaacatcatgatgcgcatctttgtcaatattactatcagtcactttaaccacgtcagactctggttctatcacatctgctttatcagacgcatcttttggatttgttgcagtgctgctattttcagctgtatccgttgcagaaaccttattttcttgtcctgtttgtacatttagcggttcactcgtattattttgtgatgtgtcatcatcttttgtcttgatatcctgatttacaattctgacatgatattgaccttcataaccaatgtttgccacaacaactttaacaattgcattgtaaattgctttgtcagatacatatgggaaaatcagcgttctagaattatttttaggatctttagaaacagtagtgacacgtttaccttctacaattaaatctttccagtaactgtcatcctttgttttcatcactacatatttttgaccatttaaagttgctgtatagaatggatgttcaacaaatccgtccataactgactcactattttcttcactttcaaaaacaacaaaatgcgcttcttgtaaatctgttaattgatcatttgtaggtgtaacattttcaaattctgtcactgcagacttaacttgatcagctaactcaactctcgtttggtctaatttctttttatattctgctttatatttttctggcaatttatcttgtaatttttctaattcataaacttgtctttctaacgttttagctttatgatacggtgctaataatttttgtaaattgtatgtttcttcatctacatagtcatctggattattcgtaattggctgtgcaaagaccattaatgtatagtcataatcttcatggaagttctcaccatattcaatagatgacacaattttaacttctctcgccccattagaaactggaaaacgaatataggcataatctttatcagaatcatatgatactaattcgactggtaactttttgtcaccttcataaacttcaaatttcttccatgttgaagctgtctttaaacctaattcaattattggtcctgtttttgtaaaaataacagttgctggttcaacagtactagcataatgatagaactgtctttcacctttatcatttttcatttgaaaatcaattggtcgccaattatcagctgtatgttctttatcaatgatagctgggtttttaatggcatcttgtaatgattcatccgctggcggatattgttggttcccattcgattgattacttgatgcattcgttttatcgttggtattaccattagaatttgtttcatgagctggttggcttgacgcttgatctgcattggctgaagatactggttttgcaggttgactcatattggtcgttgcctgcggttgatcactagcattgttcgtcgttgatgtattttgattagatgtattcgtgtttgtttgattacttgcgtctgaacttgattgatcattcgatgctactgcatcatttgtatctgattttacaagtgaaggatcgttataaataggttttgcaaatactaatttagtataatcataatttgtttcagctccatcatcaatttgagttgaagagacaattttcagctcttgcgtaccatctgaaacagggaatcgaatataggcatggtcttctggaacaggactatacgatacaagtctcactggcaatttttgattgttttcataaacttcaaacttcttccatgttgaagcagtattgatgtctaattcaacctcagctttctttttagtgtaatatacatctgctggatctttgatactgaaaaagtgatagtactgagtttcattgtttttatctaataattgaaaattaacttgttctcttggacctatatcatgttctttattttctactgcaggatttttaattgcatctttaagtgattcatccgctgcaggataggttttcgcagtgtttgttggttgcgtagcaggttgtgtttgatttgtatcctttggtggctgagttgtagttgcattattattttgattttccgagattttatctgaagtatttgtattttctgctgcttgcgcttgatgttgagaagtaattaaaaatagtgtactgacaatgaccgatgcaacgcctagagttgattttctaatagaatagaaagaccttaattttgggtgatgtttgttcatgttgttaacaactcctataagatggtatttaattgataataattatcaatatcaattattagtgttaattgtagcgcatcccaattaaatattgcaacctattttattaaaaatttttaatatgaatattcattgcatcgctttcctattcttcaagcccactttttatcttggaatacattaattaaccatcttcaaacattgccgttagattcgccaaattgaatctatttttagcacagcaaaaaaccgaactgctgaaataatgcatctccaacagtccggtctattaaactattcacttatctttattaaacaattaacatgatgtattagaataacccaattgcatgaccatcatcagtaacatccatgtttaatgctgctggttttttaggtaaaccaggcatagtcatgattgcacctgtcaatgctacgataaatcctgcacctgttttcgcttctaattcacgaattgtaatttcaaatcctgatggtgcacctaacaacgtttgatcatctgagaatgaatattgtgttttcgccatacatactgggtaattatcccaaccattttctttaaattgttttaattgtttttgcgctttactgctaaacgttacttttgaaccgccatagatttcagtcacaatcttttcaatcttttgctctaatggtaattctaattcatataaaggtttaaatgaattaggttgatcaatgacttctaatacttcatttgctaagtcaacgccacctttaccacctttttcccaaacttcagttaaggcaattcgtacgttattttctttagcccaagattttacatattctacttctgcatcggtatcatgtataaatgcattaattgcaacaaccggttctacaccgaattttttaatattattaacatgacgctctaaattaacaattcctgcttttactgcttctacattttcttcttttaaattatcttttgctacaccaccatgcatttttaatgcacgaatcgttgctacaactacaactgctgctgggtcgaatccagcttcacgcgccttaatgtccatgaatttttcagcgcctaagtctgaaccaaagccagcttccgttacaacgatatcagctaaatcacgtgctgtttcagttgctaaaattgagttacaaccgtgtgcaatattcgcaaatggtccaccatgaactaatgctggtgtcccttcaattgattgtactaagtttggtttaattgcatcttttaaaatcattgcaagtgcaccttgcacttttaaatctgcaacagtaactggcttgcgatctctagtgtaaccaatagtaatacgactaattttatcttttaagtctttaatacttctacttaaacataaaatcgccataatttcagacgctactgtaatattaaagccatcttcacgtggtacaccatttgtaggtccacctaacccaacgtttacatgtctaagtgcacgatcattcatatctaatacacgtttccattcaatacgtctttgatcgattcctaattcattaccttggtgaatatgattatcgataaacgcagacaatgcattattagcagttgtaatcgcatggaaatctccgttgaaatgtaagttgatatcttccataggtaagacttgcgcataaccaccaccagttgcaccacctttaataccaaatgttggtcctaaagcaggctctcttaatgcaaccataacgtttttatttaactcatggaatgcatcagctaaaccaactgtaaccgttgatttaccttcaccagctggtgttgggctcatcgcagttactaaaacaactttccctttgttttctcttggcgtaattttattaatgtcgattttagctttgtaatgaccataaggttctaatgcatcctctgaaatacctactgatgcagcaatatccttaattggttgtagtgttgattgattcgcaatatctaaatctgataaatgagtcaacttttttcgcccctttttgtttaatttatgcatttataatatgtaagttgtagctaagaaatttttacttacattcatataataacgaactgttaaaaacttgtcgactaaatcgggttagcgctttcatttttgcaataaattcacttattaaagttttgtattatacaacttttagcgcttgatactattgataactatatttttctattatttaaaatagtcatcttccaaaggtcatattaaaaataaaaaagcaatataaagatatgccattattgttatgtcatcattttcaaatgttttctacgaaatgatatgacacaagttaacagctctttatattgcttatcgtaaagtaaacgattatttaaacattaacatgaaatatgttgtcaccctttattcttcgaaagaaatcttctataacattcatgtcattattccattgtacttaaatcccctgcatctaaatttaattcccaagcttttaatacacgtctcataattttacctgagcgtgttttaggtaatttatctttaaattcgatttcacgtggtgctgcatgcgccgacaaaccttctttaacaaataaacgaatttcttcttttaattcgtctgttggttcatatccttttctcagtgcaacaaacgccttaattatttcaccgcgaaccggatcaggtttaccaataattcctgcttcggcaactgcttcgtgttcaaccaatttagactcaacctcaaatggcccaactcgttcgccagctgtcataattacatcatcaacacgtccttggaaccaaaagtaaccatcttcatctttatatgccgaatcaccagatacataccagtccccaataaaatatgacttatatttttctggattcttccagatacgatacatcatagatggccagcctttttttatagcaaggttgcccattcgatttggtggtaattcattacctgcatcatcgataattgcagcttgaataccaggtaatggtttgcccattgagccaagcttgacgtccatcgttggatagttaacaatcatatgtccacctgtttctgtcatccaccaagtatctaacaccgttaaaccgtatacttttttcgcccattttataacttcaggatttaaaggctcacctactgatagaatcgaacgtaacgatgacaagtcatatttctcaacaatatcgtcaccagcactcattaacattcttaaagctgttggtgccgtataccaaatcgtcactttaaaatcttcaatcatactataccactgttctggtgaaaagcgaccaccagctatacaatttgtagcgccatttaaccatggtgcaaaaataccataagatgttcctgtaacccaacctggatctgctgtacaccaataaacatcatcttcttgtaaatctaatacatattttccagaaatatagtgcactaacatcgcttgttgaacatgcaatacacctttaggttgcccagtagaacctgatgtataatgtaaaatcaaaccatcatccgactttaaccattcaatgtcaaattcatcgctagcagtttccatcaaactaatgaagtctatgtaattgtcttctacatcctcatctacgactacaatttttttcaagttcggtaatttatctacaggtactcgaggtaacaatgccttattagtaattaacactttagcttcactgttctctaatctatccgcaaccgccttttccataaatgcttcaaataacggcccaacaattgcaccaatttttaaaacacctaacaacgcaaaatatagttcaggtgtacgtgacataaatataaatactctgtcacctttgtcaacttctgcatgttcagacaaaacattcgctgctttattagataaccgctgcatatctttataagtatacgattcttttctgtgctcatctttgtaatttaacgctattttatcccctaatccttgatctacatggcgatctatacattcatatgccatgttcatttttccagtttcactccaagaaaatgcttgttctacgtctttccaatcaaaagtattatatgtttcttcataatctttaaggttatgtttgccttgcgctcctttataaacttctactttcatttgaaactccccctttgttatgtgaaaacgctttctttctcaatattatacataacatttctaattattcaaaatttttacttttatcctttttctagtattaattattgtaaattttctatataatgaatttaatacaatcacgacgtcgattgaggagttgaaaatatgaatcatttaaagacgtatcaatccgaagattattacattcatgacaagcaatttgttattgaaggtcctttaacacacgaagatttgaaagcgcttactttcgatgtgcatttaaccgcatttagagattctgaagatcagtatgaagctttgttagaaattacaacattaccagaaggtagaatttatgttgctcgccaagatcaactcattgtgggttatgtcacttttcactatcctgatgaaattgagcgctggtctacaggtaaccttccatatttaatcgaattgggggcaattgaagtcagcatcaattttaggcaattacaacttgcagaaaagctaatacaacttagcctttctacaccagaattcgaggattatatcgttataactactgaatattactggcattgggatttaaaaaattcaaagttagatgtatttgactataaaaaattaatgcagcggttaatggcaactggtggacttgaaatattcgctacagatgatccagaaataacaagtcatccagctaattgtttaatggcaagaattggcaaaaatattacattagaacagcaacaagcgtttgatgatattcgttatatgaatcggtttttcttttaatttttggaatatcggagggattatatgcaacaacatttatcaaaaactgcatatgtatattcagataagttattacaatatcgatttcatgaccaacatcccttcaatcaaatgcgtttaaaattaacaacagagctacttttgaatacaaatttattgtctccagaacaaatagtacaacctagaattgcaacagatgacgaattaatgttaattcataaatatgattacgtcgaagctattaagcatgcttcacatggcattatcagtgaagatgaggctaagaaatatggattaaatgatgaagagaatggtcaatttaagcatatgcacacccatagtgccacaattgttggaggtgctttaactttagcagatcttattatgtcaggcaaagtattaaatggttgtcacttgggtggtggtttgcatcacgctcaacctggtcgagctagtggtttttgtatatacaatgatattgcaattaccgcacaatacttagctaaagaatacaatcaacgcgttttaatcatagataccgatgcacatcatggagatggtacacaatggagtttctatgctgataatcatgttactacttattctatccatgaaaccggaaagtttcttttcccaggctctggtcactatactgagcgcggtgaagatatcggctatggacacactgtaaatgtcccacttgaaccgtataccgaagatgcatcatttttggagtgttttaacttaacagttgagcctgtcgtaaagagttttaaacctgatattattctaagcgtaaatggtgtcgatatacattatcgtgatccactaactcatctaaattgtacgttacactcattatatgaaattccatattttgtaaaatatttagcagatacttatacgaatggaaaggtaattatgtttggtggcggaggctacaatatttggagagtcgtaccacgtgcatggagtcatgtattcttaagtttaatagatcaaccaattcaaagtggttatttaccgttagaatggattaataaatggaaacattattcatctgaattattacctaaaagatgggaagatcgtttaaatgattatacctatgtcccccgcacaaaagaaattagtgagaaaaataaaaaattagctttgcatatagcgagttggtacgaatctactcgtcaataagtcacctaatctgcaacgattttaaaagataaataaaaggcattcttccaacacccgtataagtcgagtcgttagatgaatgcctaatttagtgaatttattttgtagttcctcggtattcaattctgtgtggtaaaactacatttggttcttctatcttttcatcgttcatatattttgttaataagcgcatccctactgcaccgatatcatataatggctgaataacactagaaagttgtggtctaaccatctcaactaagcgtgtattattgaaactaataatttgtaattcctctggaactttaataccagcatccattgcactatgcatgataccaatagcttcttcgtcactgatacataatatagcatctggaagattacctttcattttagcaaaagcttttacgccttctttataactttcagcaccagaacaattcaatgtatcacctaattgaagaccatttttatttaacacttcagttaaacctgctaatacatcttcttgtgcttttttagaatgctctccacctactaaagcaaatgatttagcgcctttttcaattaattctcccgtaatttctttcgcagcttcagtaaaatcaatattaacagatgctatatgtgcatccttaccatttgttcctgatactactacaggtacagatgattgatttatcaattctttcatttcttcagtaattgtaccaccaaggaaaataataccatcaacctgtttacttaataagttattaaaaatttctttttctttttcaggatcgttatctgaatttgaaataattgagtgatatttatacattgttgcaatatcttcaagtccacgagcaagttgtgaataatagatattagatatatctggaatgatcacacctactgttgttgtctttttactagctaaacctctagcaacagcatttggacgataattcaaacgcttaatgacttcgttaactttatttttagtttctgctttaacattttggttcccattaacaacacgcgatactgtggccatagagacacgcgcttctcttgctacatcatatatagtaactgtcataatttcctccttgtaaacgttttattcattataataacatgttttcatttcattttcatagtttaccatattttaatttacagtaacatatttttgtttggaaaaatttagcgaaaagcctgaaataaaaacaaacgctaaatgataacgaacgatatattttaattttatataaacttttttcatttttaattgtaatattttgagaaagccttttcaaatatcaattgcatttgttgaaaaatgttcacatttcagtaacaaatgtgtgaatctattatattttacagataattcatagttataattttaattactgctatcagtcataatctttaataattgtgaaattgaacaaatgtcgaagtattataacaatcgttaagtgcagtatacctttatttctatacaaaaaataatagccactctaaaagtaatatactcttagaatggctacaagtttaaaattgtcgattcaaagataatattctacttcaacatgacttattagttaagtagtctatagtttccttgaaatattattttaactttttagcgttatataaatcagacaaaggctttaattcatcataaaatgcttggaattcatctaagtccatttgttgacccgcatcactaagtgcaacagatggatctggatgcacctcagccataacgccatcagcacctactgctaatgctgctttcgcagttggtaacatgatatctttacgacctgtactatgcgtaacatctaccatgactggtaagtgtgtaccttgttttaaaattggtactgctgaaatatctaaagtgttacgtgtcgccttttcataagttcggattccacgttcacataaaataatgttttgattaccttgtgaagcaatgtattcagctgcataaacaaactcttcgattgtagcagataaaccacgttttaatagaataggctttttcgtacggccagcttcttttaataactcgaagttttgcatattacgtgcaccaatttggaatacgtctaaatactcatcagccacttcaaaatcatttggatttacgatttcgctgacaacatttaaatcatatttatctttaatttgtttaagtatcttaagaccttcaacacctaaaccttggaaatcatatggtgatgtacgtggtttaaatgcaccgccacgaataaatttttcacctttagcatgtaagtttttagcaacagcttcaacttgttcaaatgattcaactgaacatggcccaaatacaaatgatttattgccgtctccaataatgcccccattatcaaatgttacaatcgtatcttcaggtttcaacttacgtgatacatataaatgtttttcattttcagatttttgtaaatctgtagaggctttgaaaatttctttaaataattgcttaatagtattatcgttgaatggtcctttgttactatcgattaagtcgttaagcatttctttttcacgttgtggatcatagatacgtgtaccttgttttaatttttcttccccaattttttgtgctagttcaccacgtttagataataagtctaaaatttgatgattcagtgagacaatctcacttctgtatgattctaatttattactcatccttactcacctctacgaattatttcaagtatattccactttaaagcaataaaatataatgttaaaaaatattctaacaatatcatatgtatagttcaaccctaaattgacagaaaataattaattttctaactatatggtgcttgactgacatttcgattttctcagtcattgtttgacagttatattctatattgatatttattagcacatgttaatcaattaaataagtgtcatgattatagcttattttgagtcaacattacagcttttaagaaaaattttggtttctatcttctattataaatctaaaattctcatacattcaacctaacgcttaataaaaattaacaacctttgtatattaatataaatctatagtgaacatcactcaccaacatattaagctatatttgaattagtgaacgtcattgtaccttcttagattcattatttatttgattatcaaatatttttccatcatcagcttaaaatgtgcaatatcactattgttatctaaagatgtttcaaacaacataaatacatgaaatgatcgcgttgcctttcaaaataaactgatgatatcaaaaaaggtaagcacctgaatgcctaccttttattttgaaattcaatttttaaaaatataatacatagctgaatggtatgattgattattaaacgattttagtatgcttagtcattaaatgtacgtttctctattttacttttagctttttcaacttttgcatttgatttttttgatgcatttgatgatttagcatttgttgtttttgaattcttattactagtttgattattcttttgagttgaattacttgaactactctgtttctttgcaccttgtgatgctttcttattatgttgctttttctgacttgaagttttatttgtagatgcttttgatgcatttcgtttatttgaaggtgttgtttttttagattgtttacctgatttcttgtcaacatctgtattatcagttgttttttcatcagctttacgtgtaataacaccattttcaaatttagcttctttttgttttacagtgtctttattatctgtattacctttttctgatacatcattctttttagtaactaattgaggaatttctttcaagtcatttttagcaactggtttttctgcaaataacgcttcagttaattgactctcttttgaacctggtgttaatttagcttgcttctgttttgcagcgttcgctaatctttcagcttgtgattctggttttgatacttctacctttgctgcacttgcatctttagttgatgtgtcactgtctttctctgtttgtacttctcttttagcttcttgaatcgcttgtgcctcttgtgatgtatcacttaaattatttgcacttgcttcttcttttatcgctgcttgttgtgccttcaatgccgctgcttttgattctttatttgatacttctgcacttttatctgtttctgtttgtacttctcttttagcttcttgaatttcttgtgcctcttgtgatgtatcgcttaaattgtttgcacttgcttcttcttttatcgctgcttgttgtgctttcaatgccactgcttttgattctttatttgatacttctgcacttttatccgtttctgcttgtgcttctcttttagcttcttgaatttcttgtgcctcttgtgatgtatcacttaaattatttgcacttgcttcttcttttattgctgcttgttgtgccttcaatgccgcttgttcatttttagatttgtttaaaaatccttcaacacgttcttttgtaaaggcaaccgtttcttcaagttgcgtttttctttcttcaaacttttgcgacagttcttgttctttgacttttaaatcatctgctttttgataaactttatttttaaaatataagcctaaagctgaaccaacaagcgcgccagttataaaactaacaacaaaatctttacggtttggtaatggttcattttgataagtgtgtttattttttaatgttcttttattattttgttgttgcgtcatttgtatatcctcctataacaaatgcacttaaataagtaacaacctcatttaagtgcatttgtttaattattaattatttatctactcgagaagtatagctatgatttgcatcagttgctacattattagctttgtaatttgcacttccacgacggtagtgtctattttgccatttgtctgcaatttccattgcaacatttgaccattgaacaacttgtgagattttatcttcattttgagaaatattatgtgtaattgaatttgttacacgatctacagagctgtttaacgtttgtactgagtcaccgatacctttaacagcatctacaactgagtttaaacgatctactttaccttggatatcctcagttaaacggtttactttatgaagtaaatctgttgtttcacgagtaataccttgaacttgaccttctacaccgtcaagtgtttttgcaacataatctaagtttttcttaacagaatttaatacagctacgataccgatacataaaattaagaatgcaatcgcagcgataattccagcaattggtaaaatccaatccattaaaaacgcctcctaattaacatgtaataatgtcattaataataaatacccatactactctagtataaacatattaaaacgcatttttcatgcctaatttatctaaatatgcattttgtaatttttgaatatcacctgcacccataaataaaataacagcattatcaaattgttctaatgcattaatagaatcttcattaattaacgatgcaccttcaattttatcaattaaatcttgtatcgttaatgcgccagtattttctctaattgatccaaaaatttcacataagaatacacgatctgctttacttaaactttctgcaaattcatttaaaaatgcttgtgttctagagaaagtatgtggttgaaatactgcaacaacttctttatgtggatatttctttcgtgctgtttcaattgtagcactaatttctcttggatggtgtgcataatcatctacaataacttgatttgcaattgtagtttcattgaaacgacgtttaacaccaccaaacgtttccaatgcttctttaatatttgtaacatctagcttctctaaataactaatcgcaattacagctaatgcatttaaaactgtatggtcaccatattgtggagataggaagtgatcataaaactcaccatccacatacacatcaaaagcagtacctttatccgtaatttgaatattttgagcataaatgtcatccgactctttaaatccatagtaataaattggaacatctgcttcaattttacgtagatgttcatcatcaccccaagcaataataccttttttaacattatgtgccatttcttggaatgcatcaaaaacatcattaatatctttaaaataatcaggatgatcgaaatcaatatttgtcataattgcgtaatcaggtttataacttaaaaagtgacgtctatattcacatgcctcaaaagcgaaataatcactttcaggcaatcccatacctgtgccatcaccaattaaaaatgaagtctttttatcaccattcataacatgtgataataaacctgttgtagaagttttaccatgtgcaccagttacagctactgaagtatattgatcaataatctgtcctaaaaaatcattataacttacaacatctaatttcaattgatgtgcacgtactatttcttcatggctactcgcgaatgcattaccttgtataactaccatatcttcttttatgttattagcatcaaatggtaatatttttatccccttatttctaagagcaacttctgtaaatacgtagttctcaatatccgatccttgaacttcatgtcctaaatcatgcatgatttgtgctaatgaactcatgccagaacctttaattccgacaaaatgatagtgtgtcattatataaaactccttactcataattattctttatttaaatctgcttccgtaacataaacatcccttggttttgaaccattagcactcgaaacataaccgagttgctctaattgatcgataattcttgctgctctattatagccaatttggaaatgtctttggatcaatgatgttgaaatatgtccttcattaaccataaatgcacaaacatcatcaaataattcatcttgtgattgtgtttgtgtttttttcaacaattctttttcttcaaataggtagtccggttctctttgttgtttgataaaatcaacaacatcatcaatttcgtcatcagaaacaaatgtaccttgaactctaatcggtttattcataccgctaccaagatataacatatcgccatatcctaacaagcgttctgctccaccactgtctaatatcgttcttgaatctacacttgatgataccataaatgcaattcttgttggtatgttggctttaattaaacctgtaattacattgacagatggtctttgcgtagctactaacatatgaataccacatgctctcgctttttgagcaattctagcaatagactgctcaacttcttgcggagccatcatcattaaatcagccaactcatcaattacaatgacaatttttggcattctttcatcatatggtgcttttttgttaaatgctgttatattacgtacatggtaatgtgcaaataacttataacgtctttccatttcttctacggcccattttaaactctgtgtagctgctttgacatctgtaattaccggtgcaactaaatgtggcaatccattataaggagctaattcaaccatttttggatcaataagtaataatcttaattcctcaggatgatttttatatagtaaagacattaaaatactattgatacaaactgatttccctgagccagttgcacctgcaattagtgcgtgtggcgttttagcaatatccataagtaatggttcattattaattctataccccatcgcaactgttaatttagattcagcatttttaaaacttggagattcaataatagaacgtaagttgaccgtcgttggattttggttcggaacttcaataccaacacgactagttcctggaattggcgcttctatacgaatatctttcgctgccaatgccattttaatgtcatcttgtaatgccgtaattcttgaaactttaactcctttttcaactgataattcaaatcttgtaacacttggaccttcagttacatcttgtacttctgcaggaacattaaagtaaaatagtgcgtcattaagttctttctttttatctgtaatccagtcctcgtccggctcaataacttgtggttcttctagtaatgaaacacttggcaatttaatatttgggcctttacgaatcatcggcttagatgtttgtacagcttgatttgttgcaacatctggttgattcgtccgaggtctattttcattagctgtatcttcattttgatttgaaaatgaaggctgtaaatctttttgttgatcatcattatcttgttgtccactagtattgtttagatgtgttgtttcttcgctttcttcagttatgtcgcttacttctgaaactgaagacgaagttaattgatcaacttgctcattttccaattgattatcatcttggctctcttcaaatatttccgtttgagttgaatcaacagaaggtttctgatctgaatattgttgtgcattttgataatcattttctgtttctccatgaccaataagttgatcgttctcaacattgtttgatgtcatattatttgttttatatgcatttgtatttgactcttgtgaatcagtgcttgatgatggtgtggcttgactcgcagtcttgctttcactcacagcttgcttactttgtataggctttaattcaggcacatttacttttgaatgctttttacgatccatcatacgctttttatcagatggcgtcatgacaacattaaatggccttttacttaaagttgaaaccttttcagtctgtttctttgggtttgcgttttcaatagttttctcttcgccattttgttcactttcagctgcttcgttttgcacattttctgtaacttctgcgctatgcttttctatttcattcatggttgaatcttcaacaacatgaccatcattcacatcattcgttttcaatgagttgacacttaagtttgtttgattatcttttttatgacgtggcgctaattcaatgtcattatcaaccgttttatcgatgttattaacttgagattcagttactgcgtgctcttgcgttttaggaacgtctacatgcatttcagacgcgtttctattggtattatcttggctatttgaagtagtatcctcatctacttctgtatcatttaattcataaaattctgcatcatctatttgacttcctgaatattcttctttattcgttgctccatcttcttctgaatcagcaattaatctggattgattttttagtccatcttgatcatttacttcaacgttatgttgtagtgctgattgacgttgagacgttacatccgaaaccgtaacttcatcatctgacaattgttttgttgtcgatacttgattcaaactaacttcctcataattgtatggactttcatctacatgagcgtcattagtgtcttcattttgtattgacgcttgtttattttcatcatttgatacagcttcattctctattccatttgtatgatgctgactagccactgtactattatctgttaagtcactatcatcatttaatgaactatcaccaacatagcgttccgcttgtttagcatacatttcatcaattgcacgttgtattgcatcttgctcttcgtttttatgctcttcacgcttttgctgcaacgcttttttaaatcgacgcttttgaagcactttacgttctcgttcacgtctaatttcttcaacaatttgtgaagcataaatattttcaattttgatagtattatcaacttttgaataattaggcgttgattttgttgttgatgatacattttcatctgatgatttagatgcagttccttgtttgacaacactatcattttgtttctcttgttctaattgtttattttgagacgtttgcgtctcagctacatatttatcgtatttttgtttatctgactcaactttttctgaagatttacttacagggatacgaccattttctaactttttaggtttcattgtgccaaaaatagctgacggtacctctgaagtcttgaaactttctttgtgataatctggagttgaatctttagcacgatgatttgtattattagaatatatattgtgtgtttttgacttgtgcgtttccttctcaataccattaattgcagaaacatatgtacctggcttattcgtatggtaatgtgaatgatctttatattttatactttgctgtgatattttagaattcccacgttgttcactataattttgttcttcagttgtttgatttcttctacggcgatgtcgtttttgcaaacgagaatcgtggctttgtttgcgatagtctcgacggtattgttctttttcatctgaaatagtatctgcagattgttcaacattttcattttcataagctacgctcataggaaaacggaatttccccctcggacgactataaatatcattattttgaggcagtaatgagtcatgatcgttatctatattttgtgattcttgacgtctttttttctttctatgaatcaagtcatcatttgaatcattatcttcgccgaataatttatcaaaccagctcatattttcactaccttccttaattattcaaaaaatgcttgtccaatttcatagctgtcatttaataccataatacctttttcttcaggtgcattaggtaaattcaattctttcattgaacaaatcataccgcttgaggcaacaccacgtaattcagcatctttaattaccataccgctaggcatcactgcacctactttagcaacaacaactttctgtccagcttcaacgttaggcgcgccacatacaatttgtaatgtgtcatttccaacatttacatttagtacacttaatttatctgcatcaggatgtttgtctttagtttcaacgtagccaactacaaatttcggtgatagatcagcatttaatttataatcaaaaccagcttctgaaatacgcttttggaatacatttacaagttcatcagttaatttaatatgacctgtttcttcaattgttatatcttttgaaatttcaaaaatattataacctacaacattaccttcattagtaatttcaacaacgttaccttttttattgtagtttaattcaccttcaactggttcaatttgtaaaaatgcgacatctcctacatatttaggattgtaaaataaattcattatgaccaaactccttatccaattatttctatttatctttattaaatttacgacgatttgcttctaaacgctgaatcacgtttggatctcttttttgtttattgtttttacctaaaataaatatcggttcaagatgaccctgtttatatccaaaggataatgatgtaattggaactagacctttagtgaaaaattccattgttaaatgtgccatcacatcatatcctgttttattgcgtatatctgcaattattaacacatcttggtgtggcactgctacgagcatttcgccttgacattgtgcctcaatttcatttaaaaatgcagtatttagtatcctacttgcatcatacccgtcatttgagttaataaaataaaaaatattgccttttacttcatcagtcgtatatgaatttgacaattttctaacattaaacagagacatttctcttatttgttgttcagttaacttcaaatcctctaacatgctttcgtcaattagacgatatgatttccctaaatcgactgcgtaataaactgctgtttctgcagtatgctcatcatagataaaaggaacaccttgtttagtttttttatcaaagctagtcgctctaatgacaggcataatttgactagatgatatactctcaagggttttatctgccatttgtgcaatagcttcatcaacgtaataaacaatttcatctacaattttttcttttttatcttcatattttgcgactatagcgttaagtttaatcgtgatacctttgttattatctgttcgataaatacgcaaagtttcttcttcacgattaaatttaaaatcaacgtctaaatggcttaaacgttcctttaatttatctctcatttgaaaggtattcatatgtaacactcctaatttcgcaccttataatagtttacaataaatcaacacatagtaacagagaaaaacgagtattaccccgtttttctctagtctaaattacacgtattgagctaaaaatgcatctatctgttcaattgattttcgttcttttccaatataacttccaagcagttctccatttttatatactagaaaacttggaatccccataataccattttcaatacaaatatccataaatttatcacggtctactgatacgaagtcaaacataggatatctcgcttctaattccggtaaatctggttctatcactctacaatctggacaccagcctgcagtgaattcaaatactgtagcaccttgttttaaagattcaaattgttgttctgattcaagttgtttcatttttatgtctccttaattaatgattatatataactatttagggataatagttgttattacccgattatttatattgtaatgtttctatttgattgttatctaaattacaaatggcttctgaaagtaaagatctagctgcaaaatagtctcttatatcaaatactgagtctgtactatgaatatatcgtgcacatacaccaataactgcagtcggaataccaatattagctttatgaatttctccaccatctgttccacctggtgacatatagtattgatgttcaatgtcatgtgcttctactaactttaataaatagtccctaaatgcaggctttaaaatcattgtaccgtcttttatgcgaattaacgtacctttaccaagttcaccggataatggttggttacctttaacgtcattggcaggtgaacaatcgacaacaaatgcaacgtctgggtctatcatctctgcagatgctttcgcacctcgtaatccaacctcttcttgaacatttgcgccaacatacaagtctacatctaattctatatcttttaataattctagtatttcaattgccaagacacaaccataacgattatcccatgctttagcactatatcgatgttcagataactgtgtgaatggcgtgtgaggtacaattgtatctcctatatctattccgcgctcacgtacttcatcttcattttgagcacctatatctaatgttaaatctttaatttccggtgcaccttcactaccagtacgaaaatgtttaggtatattagaaacaacaccgataattttatcgccatttctatttttaattactaagcgttgtccttgccaaatatcatttgcaacaccacctaaatttgtgaattgaatcattccatttttagtgatatttgtaatcatgaatccaatttcatccatatgtgctgcaatcattacacgttttgcatttggatttttagattttttaacaccaaaaaaaccacccatacgattttcaataaattcatctacgtacggcgccatttgctgagtcatataattttttacttcttcttcaaaacctggtgccccatgaagctcagttaaagtttgaattcgttgtaatgttacttttttatttatgttcataaaagttctcactccttataagttattatatcatcttcaatatggtaaactaatgatatgaatttgaaatcaagggagcataaatgatgactaaactgaaatatataattccaacaataattgcagtagctattgtaattatttctaccatttcaatcatccaatttattaatcgtaaacgctataatcccgttaaagtacttaatgaagtaaaatcatattttatgaatgtcaaaggctcgtatatcgtttacgaaccattcgttcatcctgaaactgataaataccgtttagtttatcaaggtggaattacaactattaaaaatggtcaaaatattcattatgatttttatgcagatgcatatactggtgaagtcattaacattgtagagcgttaatacgaattttatccatatttgatttggatcgtaaaacttaaaaatgagccacaccctaattagtaagataggatgtggctcatttttttattcttgaaaatttgtttagtaatacatctttattttagttattatcaactaatgtttcacgtaaaatatatgcatctatactttcgccatcatcgctgtattttacagcaaagtagttttcatcatgataaaacaagaaccaatattgttgctggataaaatatggtatcatgcgttccttttcacgaattgattgcataggataatcatcatatgctgttacccatagaggatttttatgtgcagtagtcgggaatatatcacccatatgaactgctttatctccttgactttcaatcgtaatgattgtgtggccaaagctatgacctccactatgttgcatcttgatacccggaaccggttcaaaatgtttttcgaataaaatcaacttgttactataatcgcctttattcttatcccagtaagttgatttacttcttatattaggtgcaataaactcatgccactcatcttgttgcacaacatgaatcgcattttcaaaaattgcatgtcccgcttgatcagtcaaaccggcagcatgatcaaaatgcatatgtgtcattagcacataatcaatatcctttggcgttaaattataatttgccaaatcagcagttatatgactttcttcatctacaccaaaattacgtaattgcttttcagataatttaccattaccaatacccgcatctataatcaaattatattgagccgtttgaatcaaaattggatgtgtcggtaaattgatttgatttcgttcatttgcattgtattgctttgaccacaaaggcttcggaacaacaccaaacattgcaccgccatccatttttgtattgccgccatttagataatgaatagatatatccccgattttcataacatcacctattctttctgtattcgttattacaattagcatgtgtttattacatcatatcactattcatgaatgcgaacaaaaacgaaacgccccacactaatacacttccaactacttataaaatttaatgcaatcacattatatgtaaatgcatcataaccatcggactgtaattttaaattaataattaaaatttccaagtaaaatgcaagatttattcttttaaatcaaaggtgtttagtataacattattcataggcgcaattgtctcctttagtttaggtttggtcactttaaattatagaggcaatagcgcttttttgtattaaaaaacagaatgttccacctttccaccataaaaggttaagaacctttttatattcaaaatcaaaaaatcggacatatgaaaattttttcatcgtccgatttattatagaaacaatagccttttctacagtatcatttattatagtacgaaaaaacacttatgattgtatgtgtacataccctcataagtgctttatttttgtgaatggaatttcgcttccatacgataaatacgtgaccctttatccgaaaatttcttttcatattctgttaaaatattactgccatcgtcttcttgatgtaaatttagatttatttttgtaaaatacattccaaattgagacatactttctaaactgtaggcaaatagtcctctgttatcagttttaaagtgtaaatctccttcatcatttaagatttgttgatacaacgctaaaaacgtatgatacgttaaacgtcgttttgcatgacgattttttggccatggatctgaaaagttcaaataaatacgagaaacttcgccgtttttaaaatattcatttaattcaatggcatcattacaaataatctttaaatttgttaaacccatctctttaactttatctaatactttataaacgatacttttctcacgttccattgaaatatagttaatatgaggattttgagcagctaatgttgtaataaactgccccatacccgaaccaatttcaatgtgtatcggttgcgttttatcaaaccattcagtcattttccctgcatgttgaccgtccatgtcaaccaattcaggatgatcttttaaataatcctcagcccatggtttgtatcgaactctcatattttattctcctcttaaataaacatgttactattcataacttcatttaggaatttaagccaagtgttcatatccttatatcttttttgctcttcataccattgaacaagacctatagattgaattaccgtataccatttcatacgtttatttaaattcaagctctcttgaactccatatgtttcaagccattcagaccattgttgttgtggaacatagttgtaaagcagcattccgatatcaattgccgggtctgcaatcattgcaccttcccaatcgactaaaaatagttcatctcgatcggataataaccaattattatgattcacatcaccatgtacaacagtgaaaaaacgcgaatctaaactcggtatatgctcttctaaataggttaatgattttctcacaatatgatgtgttaaaacttctcttgataaagaggcattaattttattaagcataatctcaggagtaataggttccatttccatacgctttaacatactcaataaaggtctagaattgtgtatcttctttaataaatgtgcaactcttgtttgcttcatttcatttgaagatagttcacggccatttttccaatgttgtgctgtaacaacctcgcctgtttctatgcgtttcgtccatactaatttgggcacaataccttctgctgataatgccgcaataaatggatttgaatttcgttttaaaaacaacttttgtccatcttgttcagccatatatgcttcaccagatgcaccacctgcagaatcaagtgtccaccctaattgataaaactgctccaactcgtccacctcactttcaattagaaaatggctctagaaataggtttttcaagagccatatattctaatttataacaccatgctggtacaaattttatgtccagataattattttaaatcctcaaccaatgcctacattacacgactaaatttaaatcgtaatgtctgtcattgacaccatacattctatagtcacttacttgacataaaatgttaccgtgtctaaaactacatgtttttgtaacttttgtaggcgataaactctagttttcaaaataattgctatcccattttcatggttagcataaatttatgaactgtaacatttacgtacttagtaaaatatgatgcacatcatatttgtaactcatagaaaattttataatttttatcattatatttcaactgaaaatgagaaacaaaatggcactttttactaatatgtgttttctaaacaacacttttaagcttcgttttaaattataacataattcacttacgaaagttgataaatttaagtaatttaatctaaaaatatgatgaaagaattttaaatactgtgtgactctatatacttttcaaatccttcttgtagttgacgtgtaattgggccaactttaccatcattaactggttcaccatctaatttaataacaggtgtaacctcagctgaagtacttgaaacaataacttcatctgcgtttctcaagaaatctacagtaaacgtttcttctttaaatgggatgttatagtcttcggcaatttttttaattacaattcgtgtaataccattaagaatatagttgttaatcggatgtgtataaatcacaccgtctttaattgcataagcattacttgaagatccttcagtgacagtttcgcctcgatgttggattgcttcaactgcattatatttcacagcatattcttttgctaatacatttcctaataagttcaaacttttaatgtcgcaacgtaaccatcggatatcttcaacggtaacaccattcacaccattttctaaatgatcataaggacgatcataactcttagtataagcaacaattgctggttctacttcaggtgtcgggaaactatgatttctttcagctacaccacgcgttgcttgaatataaattgccccagtttcaatttgattcatatcaactaatttacgagatagttcaattaattcttctacagaataatttaaatctaaaccaatctcattggcactacgtaaaaatctttcataatgttccgttactgtaaataacttaccattatatacgcgaatgtattcataaataccatcgccaaatacgtatcctctgtcgttgtatgaaacctttgcttcacttggacttacaaactcaccatttaaaaaaattttttccatatattattcctccacacataatgaataaattgcttctaaataaatactagttgcattaaataactgttttttagtgatatattcattcttctgatgcattaagtcttcagaatcactaaacattgcgccaaatgctacacccttgtctaagtttctcgcataagtaccgccacctatagtataaggttcagtcatatcatttgtttgatttctatatgcagtaactaacttttgtacaaaaggatcatttttatcaacataatgtggtggttggactttacctaatttcacttcaaagccatattgttgaatctcatttgcaaaacgatccatagctttttcaaattcaaatccttctgggtagcgcaagttgataccgaaaagacccgcattttcattatcatatgtaataacaccaatgttagttgtcacatcacccatgacatctgtatggaatttcattcccatcttttcaccaaaatctgaattaaataagtagcgattactaaatgctacaaacgcttttgcattattatcaagatttaatgatgctaagaattttagtaagtaaagacccgcattcacaccgatagatggatccataccatgaaccgctttaccttcaactgttaaaactagaatgccactatcaacagtactatcaccttgtaaatgattttgttctaaaaagtactcaaagtcttgaataacatctgtcatattttctttaacaagcactcttgcttctgcatgatcaggtaccatgttgtaacgttcaccagatttaaaagttattaattcataatcaggttcatcttgatcttcagtaagcttattttgaactaagtcaaatgtagtaatgcctttttcaccatgaatacacggaaattctgcatctggtgcaaaacctaatgttggcatttcttctgttttaaaatagcgatccgtacatttccaatcagattcttcatccgtaccaataatcatatgaatacgtttcttccaatccacattcatatcttccaatatcttaattgcataataagcagcaattgttggacctttgtcatcaagtgtacctctagctatgataacatcttctgttacaaccggctcaaacggattactatcccatccatcaccagcaggaacaacgtcaacatgacataagatacctaatacgtcatttcctttacctgcctcaattcttcctgcaatatgatccacatcatgtgttgtaaatccatctctatgtgcaatttcatacatgtagtctaatgccttacgaggacctggaccaactggtgcgtcttctgatgcttttgcatcatctctcacactttcaattgctaataatccttttaagtcattaatgatttgatcttcgtattgttgaactttttctttccacattcgaaatcgacttccttttttctataagttaaatcctattttacatgaaatgatataaaaactacaataagatgtcagaaaataataaaaaggaacaaaacaacgctatcgatttaacataaaattaatgataactgctttgttccttttctgtattaatttaatttaatatgccagttcaataccaacttattaattgtatgccttattctttatcagacaatgcatttttattcttttttaaatcttcttcagtgacgatacgtaaattattatttggtgctgcgccaccttcatcatcaaatttacctttttcaatactttcgtcagtcttattgtcatattcggtaaattttgatttttcttcttcgaaaaatgcttttggattattttttaatctattagcatattctttcggatttgtttttacttctttaattgtttcatttgcaattgttcctaattgcgtcgctttatccttagcattatctttatagctttgaggatcttgtttgtatttattatattctgctttcagcttgtcacgactatctttacgtgtaacaagtacagctgctacagcgccacctatacctaaaatcgctttaaataaattaccttttgccatatcaatcgtctcccttttatttataatttaatttgtcaaaatcattttcagttaataaacgatattctcctgaatctaaattgctatccaattctaaatcagcaattttgatacgtcttaaatgtaatacctcattttgaatgctatgaaacattcgtttaacttgatgatattttccttcataaattgttacgtgtgacgtttgattatcaatataagttaatattgcaggcttaaccttgccatcagacagtgttacaccctctttaaaagcttgaatgtcttcttcagtgataggatttgctgaaataacttcatattttttagaaacatgtttgtttggactcattaattcatgattaaaatcaccatcattcgttatcaataaaagcccttctgtatctttatcaagacgaccaaccggaaaaatatttaaatgttggtattcaggtattaaatcaataacggtttttgaatgatgatcttcagttgccgatatataaccttttggcttatttaacataatatagacattttcaacgtattctattaattctccacgaactgatatcttatcgttttctggttctatatgtgtttttggtgatttaattacttgttcgttgacatttacaaggccttttttaagtaactgtttgacctcattacgtgttccgacgcccatatttgctaaaaatttatctattctcatcgtaaaaacctaactctacgtcttaatttttcaggaatttcacctaagaattcgtccgcaagacgcgttttaattgtgattgtaccgtaaattagaatacctactgtaacacctaaaataataatgattaagtaaccaagtttagttggctctaagaataggttcgcaatgaagaatactgcttctacacctaacatcataataaatgagtataagaatatttttgcgaaatgaatccagctatagctaaatttaaatttcgcgtattttttaagaatatagaagttacaaccaattgcgaataataatgcgatacttgtgcttaaaacagcccccggcgtatggaatagcataattaatgggtagtttaatgctaatttaattacaacagaagctaaaataacataaactgttaacttctgcttatcgataccttgtaacattgacgccgttacacttaatagtgaaattaatattgctacaggcgcataatagaataataagcgactaccatcatggttagggtcatgacctaatacaattggatcgtaaccatagaatactgtgaataatggttgtgccaaggccataattccaatactagctggaacagttataaacattaatacaccaatagatgttctaatttgatgatgcatttcatgtaagcgaccttctgcaaatgtttttgtaatataaggaattaaacttactgcaaaaccagcacttaatgacgttggaatcataacaattttatttgtagacatattcagcatattaaagaatatatcttgtaactgtgatggcacaccaactaatgataatgcaccattatgcgtaaattgatctactaagttaaataatggataattcaaacttacgataacgaatggaatactgtaagcaataatttctttatacatcttgccgtacggcacatcgatatcggtataatcagattcaaccatgcgatcaatattatgcttacgttttctccaataataccaaagtgtgaatatcccaataatcgcaccgacagcagcagcaaatgtagctataccattggctaacaaaatagatccgtcaaagacatttagtactaaataacttccgattaatatgaaaatcacgcgtgcaatttgttcagttacttccgataccgcagtaggtcccatagatttataaccttggaatatacctctccatgttgctaatacaggaatgaagatgactaccatactaatgattctaataatccatgtaatgtcatcaactgaccaaccatttttatcgtgaacatttctagctaaagttaattcagaaatatatggtgctaggaaataaagtactaagaaacctaaaacaccggtaatactcataacaataaaactagatttataaaatttctgactgactttatatgcaccaatcgcattatacttcgctacatatttagaagcagctaatggtacacctgctgtcgcaactgcaattgcaatattatatggtgcataagcgtatgtgaacggcgccatattttcttgtccaccaattaaatagttgaatggaatgataaaaagtacgcctaacacctttgtaatcaaaatactaattgtaattaaaaaggtcccacgcaccatttctttactttcactcattacgtatctccctatctcatgtttattaatgttttgtaaataaaaagctatttctctgtaaaatcattttcattattatgaatatatcacaaaactttatttcattgtcgtatattcaatgaaatatcataacaaaaataataacgtgttgtcactgaatactcaaagttgctttgaaattcataaattttcatattgtcattatactactaacgccaataaatggcggacaactcttaaaataataatagtgttcgaataaatgcttatccttttatgaaaaacacattataaatatattcagcgtgagtgtcatttcataacacaagagatatagcaaagtttaaaaaagtactataaaatagcaattgaatgtccagtaacaaatttggaggaaacgtatatgtatcaaacaattattatcggaggcggacctagcggcttaatggcggcagtagctgcaagcgaacaaagtagcaatgtgttactcattgaaaaaaagaaaggtctaggtcgtaaactcaaaatatctggtggcggtagatgtaacgtaactaatcgattaccatatgctgaaattattaagaacattcctggaaatgggaaatttttatatagtcccttttcaatttttgataatgaatccatcatagatttttttgagtctaggggtgttaaattaaaagaagaagatcacgggcgtatgtttccagtttccaataaggcacaagacgtcgttgatactttagtgacaactatagaaaatcaacatgtaaccgttaaggaagaagaagctgttagtagaatcgaagttaatacagaccaaactttcactgtacatactcaaaataatagttatgaaagccattcgctagtaattgctacaggtggtacaagtgtccctcaaactggttcaacaggtgatggttataagtttgcacaagatttaggtcataccattacggagttattcccgaccgaagttccaattacatcagctgaacctttcattaaatccaatcgtctaaaaggtttaagtttaaaagatgttgaattgtcagtacttaagaaaaatggtaaaaaacgcatcagtcatcaaatggatatgttatttactcattttggtatcagtggtccagctgcattaagatgtagtcagtttgtttataaagaacaaaaaaatcaaaagacacagcatatttcaatggcaatcgatacatttcctgaattaaaccatgaacaattaaaacaacacatcacatcattattatcggacacaccagataaaatcattaaaaacagcttgcatggactaattgaagaacgctacttactgttcatgttagaacaagctgggatcgatgaaaataccacatcacatcacttatcaaatcaacaattgaacgacttagtaaacatgtttaaagggtttgtatttaaggtaaacgggacattacctatagataaggcatttgtcacaggtggtggtgtgtcacttaaagaaattcaacctaaaacaatgatgtctaaattagttccgggattatttttatgtggtgaagtattagatatacatggttatactggtggttataatattacaagtgcactcgtaacaggacatgtcgctggattatatgccggtcattactctcatgcatcaatggaataatagtataaaattgggttcgattctctctagtagatcaaccttttcattcaattaaaaatgaccttaatataacttagtcactaaaaagtgtcgttatattaaggtctttttgttaattatgattctttttcatttttattacgtcttctagctaataatgctgcgcctgtaattagtgctaattcttttaatggtaaatccatttcttcagaaccagtatttggaagttcttttacaacttttcgtacttcttgtttatctacttttttaatagacgtacaaagttttggagcaggttgccccacttttggtaatactttcgtcgcttcagctggtaatttaattgctaaaatttcatcaacaatgaattgcgtatgttgtttgatgtcatttaatgtcgcatcttcatcaatcattcttatgccatctgcaacatattgatcaattaatgcttttactttagctaattgttctggtgttgcgatcgctttgaatttcgcatatgtttgttgagcaatgttatcaatgcgcagtaagctattttctttttcagtaattactgcttctatatcgcctaatgcaacattaaatcgttttaaaactgcatcaacatcagcattagtgcgtgctgtttttaattcttcatccatttgtaattttaatgcagttatagcttttaatgcatcagccttattacgatcacttacttttcgataattttgcactaaatgtgtaacacgtgcaagatcatcattaatcgttttttcagcatctggctttttaataggatgtacatctaaatcatgtattgtttgtagatttaatgatgctgttttatcaacttgtgcattgctacgatcttgatcaatttgtccaatagcagtgtcataaatgttttgtaactgtgctaaaatactatttctttcttctaccgttgcttgaacattcgcttcaattgctagtttcttatcgttgaataatgttgttaattgttctcgcgcagttgcttttttattaataacaggttcgatttcacgaatttcgtttttcccatcatgcaataaatatgccacatcagcattagtcactgcactagcaatttgttgtttagctttaattaactctttttcaacttgtactattgcagcattttgttcttcatctgtcgcttcgttatttgctttaattaaattaattttatttgtagcgatattttgaatttgttgtaatgctgttgctttaactgttgtcgctggtttaatttttgaaataatattttgagcatcgatactattttgattaacttgcgcagtcttatctgcatgattgatctgatcaatagcctgattaagtgcttgttctactaaatgtttagcagctaatctttcttcttcggtagataaatcactttgatcaataagtgcattttgagcttcagcttttgcgctgacagattgacgcgctgctggtttaacttgaactttaggtaaaatcactttgatgttgttgttaccatcagcctcagtttgatccacttctgcattcgttttgttttgtgcaatatcatttttaattgcattaacaattttatttaacgcagcaatagcaacatttcgttcatcttgcgttgtatctagcgtatttcgtattgcatcgagttgattattattactttcatcaatgttatccaacgctgcacgtttgcgtctaactttcggtttaatttgttcgattgccttaatcgtttgatttctaacatcattgacagctgcatcttgtgtcgtattgtctatatcttgttgaccttgtttaagtgtgtcgtttatttgttggtttgcttcatctaattcatcagtcgtagcatgtggtgtatcttttatagattctacttggttatctgcgctcgcttttatggcttcttgagcttcaggtttaaccacaatgtgcggttctacgccttttaacgtagcaataccatttgattcaacacgtttcacatcattattcgctattgcttgatcgatgttttgtaatgcacgtttttcattattcgctaattgatttaaagcaacttgtttttcttcatcagtcgcatgttccgcttgctcaatttcgtgctttttagcttcatattgttgcttaactgcatctctagcagttgctctaacaatatggtcaggcgtcactaatgcaatgtcgtcaagcgcttgatttgttgagtcattaacttgctgatttgttctatcattcgtgatatttgtcatagctttagcaactaaatcattgattttatctaacgccgcttgtctttcttctgctgtcgcttctttatcttgattaatttgcgcacgtaattcattcgctttttgattgattttttcacgtgctgctggtttaacttttgtttcaggttgaataattttaatcgctgatacaccatttgttgccgcttgattcacctgactattcgtttgagcttggtcaatagctgcaagtgctttttctttttctttagctaatgctagtaaagcaacttctttctcattatctgttgaatcaagactattatcaatttgctgttgcttttctttaacagctttttcaatatctgcaattgcctttggtttaattactactttagcttcaacattatctatagcattaatcgcttgatttgtagttgcgtctacctgatcatttgtttggttttgattaatttgattaaatgcttgatctttaagttgattgatttgattaacagcagcctgcttttcttcgtcagttgcattaggtgtttgtttaaccgcttcaatacgcttcgccacttcagcagtgattttatctcgcgctgcttgtttttttacaacgtcaacttgaacagcatcgatattattctctgccactgtcgcagcttggtctacttccgcatttgtattcgcttgtttaatactttcaatagcttgttgtctgtcttgatttaaagtattgatcgcagcatttttctcatcatctgttgcatctggtgtagcattgatttcagctaatttagcattataatgctgattgatttgtgctaatgctgtaggtttttttacaatatttggctgaatcgcattaattgcttttgtacctaattgttgcgcttgatctacttctgcattagtatcagcttgatttatattattaattgccgttgctaaatcttggtctacttgatttaatgctacttgcttttcttcatcagttgcatttgtattttgattaatttcttgctttttagcagttgctaagtccgttaatacacctgtagcagtttgtttcttcgttacatgcggttgaactgcaccgatttgattgactgcatcgtctctaatactattgaccatcgcagtagtagacgtcacaccaatatcatttaatgctctatttttaagtgtattgacacgatttatcgcttcttgtttctcttctcgagtcgcgccaggtgtagcattgatatttgttatcgcctctcgcgctttatcatttacagcattgcgtgcatccgttttaacttgtgttgccggttgaatcacaactatattttgtgtgccctgatcttttgcttgtgcaacttcttgattcgtatctgctgcattaatattttgcttcgctgtggctacagcttgatcaagcaattgttgtgctgcttgttgctcttctaaggtcgcatcattattattaaatatcgcattatgttgcgtttccgcactttgatcaatagcgtttttagcatctgttttaacctttgtagctggttcaatggcttgtataccttgaattgcatttgtctttacttgctcaacatcagcattggtattagcatttaaaatattagtattcgcagcagctacagcagcatttactttctcaattgctgcttgtctttcttcttgagtcgcatcaggatttgcattgatctctgcgatatgctgttgtgcatcatgtgatacagcatctcttgctgcttgcttgacaacagttacaggcgcaataggattaatggcattcagaccatcacctttggcagtatctacatcatcattggttgtcgcttgattgatttgttctaatgcgtggttcgtggcttgcgttaattcattcaatgctgcatttttctcttcttgtgttgcttctctattgctatttatttgttgtcttttcgttgctgtcgcttggttaattgcatctcttgctgcttgtttgtgtgtcacttgtggcgcaactgcaccaattgtattaataccattatttttagctgtttcaacatcagcattggtagtagcattcgtaacattatcaatagcatctgtttcatccgttgttaattgatttaatgcatcttgaatttcgtcttgagtagcatctggtgtgttattgataatttctctttgtttcgctgctttatcacgtatagcttgtttagcatttggtttaacaactggtgttgcagtgtctccacttaaagtctgtataccttgatctttaattctagtaacgccatcatcagtcgtttggtcaccaatattcccaataatttcatttttatgttcctcgatgacttgaatcgctgcttgtttttcttcatctgtcagttcatcattttggttaactaaatcttccatgtcatcaacttttctattaacggcattttcagcgtcaacacttcgaattaacgtatgttgcatctgatttactaatgaatcgatatctgcttgagaaactcttttgtttaaaggtacattgttacggttttcatctaaaattgtttgtgcgcgtcttttaagttcattaaaaatatctaatgatgcaaatgtataatccgcttgttgaatacgtctatcgacttcggcttgcaatgcgtctttattcattatgatatcgatagtatatggatttgtacttacagtatgactttcagcaggtgaattaataaaatcttgtgtatatgttttatacgttaatatatcattaaatgttactgttcttggtgttggcacattgttcacacgtagcttatacttcaaatccaatattttatcaggcataagtcgtgccggcgaattccctgtacctccaccagtacttttaattgtaataattcgatttgctgcgtcatacgtcacattcatatcattaatatcaacacctgaattaccgctaggaaaatctttagtcaatgaattatttacatattcaacaccttcaggtaattgaattttatatacaaaatcatctgtattgaatgaagcgccaaagttaccattattctttaatgacgttgtaactgtaaattctttattatttgttgctgttggctccattgtacgtctttcaacatagacatgtgacccagaatgaagaccgattgagtctacaaagtcatagtatttatatccatctcgtaattgataaataccacgtgcatctgttattgcgtcatttttaggtacaaattgaatttttaaatgactaacattttcaggtacttttaataagcgccaaatcggaccataagcaactactttttcaccaataacagtatcgttatcagcatttttaatgattaaatttgtcataccttgatagtttttagtagtcatagtattaaattcaaagattaattcagaattcggatttactgttaatgttttctcgataccattaaaaccgccatgatcatttgtatcatttcctttaatacgacccaatgcaattacattgccttgggcttgatagttcttagcatctcctgaatcaaacatgctagttcttaccattgcatgactaaacacccctactttaccaccattaatcagtgtgtagcctggtaaattatcaacaacggttactgtaggcacagaacggttcgtacttggtctaatgttgttatcatcaaatgtaagcacttcgttaggtgcattttgtcctatattattggcattgggatcagttgttggcgtgaatggcgctgtaattgcaactggtgcactaccgtttcctgccgttggatctgctggagttgcattaggatctgctggcgcagcacgtctgcttctctttttcggtctattagatgcttcttcagcaatcgcaactaactctggcttatcagacgaatgacgaacatcttcttgaatttcttttaaagttagatgacgcgctgaatcattgttatctgtattattaggcacgtttaatgtattgttatttgatgctaaattattatttgtattcgccgctggctctgttgctgttgaattagcatcagaatgattattgtttgatgcagatgacgtactaggctgtattggagctggcgcaacttgatttgccacaccaacgttttgatgattagtcaatgcttgatttgttgatgtattgtctgttgcatgtgcatttggtgtattttgcgaaccatttactatgtcacgattagtatcggcatttgtatttggtgagttgccaggtaatgcttgatttgaaccaccttgcacattatgatccgtagttaaagcttgtgcaccatttgggtttgaaagtaataaaactgtcccgattaaagtagagaatatccctactttatattttctaatactatatttatttttctttaacaaattcatttcgttttcctcctggttgtctattctctgctgtgttgtttagaattatgctaaaaatataagctccccgattatgtttataaccatattattttgtacaacattttaagttcactcaattttatcatcatcattttataaaataaagttttattttattacaatttagtttccgttttgtaattaatcacttaaaaaatcataacaagaacgctttagattgttttgtaacagaaagcaattcatagcaaaaaacaccaagcaaccgaaacgttacttggtgtcattacaaatgtaatattattttaaattatgtcactactttaaatactttttatttccaaaccttcatcgccccaagcgtgcatgccgccttcgacattaacggcatcaataccattagcttctaaatagtcgacaactttggcactacgaacaccgccagcacaaacaatatagtaggtttcatttttattaaatacgtcaagattatctggaatcgtatccattggaattaactttgcattaggtatatatcccattgctgtttcttcgtcagtacgaacatcaacaatttgaactggtttagattctaaaagtttggtttttaattcatctgtagtaattgacttcattttaaagtcctccttaaaacattatttagctacaatattgactaatttttgaggaacagcgatgactttcatgatgtctttaccttcaatactcgctttaacgttgtcattagataaggctatttcttgcatttcttcttttgatgtatctttagcaattttaattttagctctcaatttaccattaacttgaacaacgatttctacttcatcatctacaagtagtgcttcgtcataagttggccaaggttggtacgtaatagactcttcatgtcctaattttgaccataattcttcaccgatatgtggtgcaataggtgctaacattttaacgaagccttcaatgtaaggtttataaacttcatcaactttataacactcattaataaataccattaattgactaatagcagtattaaatcctaatgtttcaaagtcttccgttacctttttaacagtttggttataaactttatctaaagatttattatttgtagttactatttttgaactcaatgttccatcttcatttaccattaaacgccatacacgatctaagaatcgacgagacccatctaatcctttttcactccatgcaattgcagcatctaaaggtcccataaacatttcgtaaagacgtaaagtatctgcaccatgagactgtactatatcatcaggattgattacatttcctttagatttactcatcttctcattaccttctcctaaaatcataccttggttaaataatttttggaatggttctttcgtaggtacgatacctaaatcataaagtactttatgccaaaatcttgcatacaataagtgaagaaccgcatgttctacgccaccgatatataaatcaacaggtaaccaatgttttaatttttcaggatctgctaacatattttcattcttaggatcgatgtaacgtaaataataccaacaactacctgcccattgtggcatcgtatttgtttcacgacgtcctttcatacctgttttttcatctacaacatttacaaatgaatcaatattagctagtggagactcaccagtccctgatggcttgatttcatctgtttcaggtaacaacaatggtagttcttcttcaggaacagttgtcattgttccatcttcccaatgaatgacaggaattggttcgccccaataacgctgacgactgaataaccaatctcttaatttgtaattaactttcttttcgccagcacctttttgctctaataattgaatagctttagtaattgccgcttcattttctaaaccatcaagttcaccagaattaatatgtttaccttcaccagtgtatgccgcttcttcaacatttccaccttcaatgacttcaatgattggcaaatcaaactttttagcaaattcataatctctgtcatcatgcgctggtactgccataattgcaccagtaccatatgttgataatacataatcagcaatccaaatttgtactttttcaccagataaaggattaattgcataagcaccagtgaatacacctgatttatcttttgctaaatctgtacgttctaaatctgactttttagaagcttctgtttgatacgctttcacttgatctttatattcatcagttgtaattgaatcaactaatgcatgctcaggacttaagactaagaatgatgcaccatagattgtatctggtctagtcgtaaatacttctacttttccttccgcattatctacatcaaatgaaactttggccccttcagaacgtccaatccaattgcgctgcatatcttttaaagattcaggccaatctaaatcatctaaatccgctaataattgatctgcatattctgtgattttaagtacccattgtttcatcggcttacgatatactggatgtccaccacgttcagagacaccatcaatcacttcttcgttagataaaacagtgcctaatgccggacaccagttaactgcaacttcatcaacgtatgctaaacctttgttatataactgtatgaaaatccactgtgtccatttatagtattctggatccgttgtattaacttcacgatcccaatcatagctgaaccctaattctttaatttgtcgtttaaaagtttggatatttttctttgtaaattcacgtgggtcgttgccagtgtctaaagcatattgctctgctggtaatccgaatgcatcccaccccatcggatgtaacacattatatccttgcattctcttatatcttgaaatgatatctgttgctgtatagccctcaggatgtccaacatgtaaaccagcacctgatggatatggaaacatgtctaaagcataaaatttcttttgacctaagttatcatttgttttaaatgttttattttcgtcccaatagtcttgccatttcttttcaatttgattgtggttgtaattcaacacatttcctcctattcaataaaaaagacacctctaactattctatttacatagggacgacatttgccgcgttaccaccctatttcacaaaaattgtgcactcattttaatagtaagagatgtcattcattcaatttaaaattaatacgatttacatttagtccttaacactagctctcagcatcactagctttctgtagaaaagctccaaacgaaattaaattatacaaattaatattatgttataacgacatttatttcaagtctataacgttaattctatttactcattatgcatctatttttttaggttgcgtattattctccttgaaaaccattaataatattaatgcaaatacaagtagtaccatcataccgataaacatcatgcgcatattaaatgcatcaactaatacaccaccaagaaatggaccgaatgcttttcctactgtagcagctgaattcacaaaaccttggtactgtccttgcttaccatctggcgctaactgattggctatagttggaactgcaggccatacaaacatttctccaaaagttaaaataatcataccgacaacaaatattgtaaagttttcggcaaaactcgtgacaaagaacgacaacataaaaatgatgatgccgacaaacatttgcttctttaagtttccttttaacagatagagaatcggtttaattaatggttgtgctactaaaatcattattccgttaattgtccataaaacactatattgtgccattgaaatattaatagattgtgtaaatgatgcgattgtagactcccattgaatatatgcaacccaacaaattgcaaacattgcacaaattagtactaatgaaataaatcttgctttattctttttaccagtaatatctaaatgagttggatatttaactttcgcattaatttcaatattaaattgtgttaccgcgacaagtgcaaacacaacatacataataagattggctaaaaagatatagttaaagctaaattctgcgacaaagccgcccattgcagcgccgacagcaacaccaatattttgcgctaagtatatcgcattaaacgtttgtctaccgccattcggccacactgctccagccattgcgtatatcgcaggaataatcattccgccaccaaagcctaacattacaagccatacagcataccaaggccacccgtgaaagaaattaagtagcgttgtactacaaagacaagtgaaagttccaattaaaatcgtcttgtatccacctaatttatcaaatagtgaaccacctaataagtttccaataaccatgccaaatgaatttatcattagcactaaaccagcaacagttaaactttttccaagttcttgtttcatataaattgtatttaaaggccacaaaaaactggaaccagtaatatttaacgccatgccaattactagccaccagactgatttaggtatattcatatttcatagttcctctctcttttttgtcaaactataataaacactataacattaaaatatgttaaaatctgtacttagaactctttttttatagaaaggaaaatgacatatgggcaatcatttccaatacgcttttgaaaacaaacgttatcacacatggaattaccatttaaaaaataaatttggacaaaaaatatttaaagttgcattggatggcgggtttgactgtcctaaccgcgatggcactgtagcacatggtggatgtacattttgttctgctgcaggtagcggagactttgcaggtaatcgtgcagattcaatcgcagtacaatttaaagaaattaaggaaaagatgcatgagaaatggcacgaaggaaaatatattgcttattttcaggcatttacaaatacacatgcaccagttgaagtattaaaagaaaaattcgaacctgtacttaaagaaccgggtgttgtgggattatctattggtacgcgtcctgactgtctaccagacgatgttgtcgaatatttagcagatttgaatcaacgaacatacttatgggttgaattaggactacaaacaatccatcaatcaacatctgatttaatcaatcgtgcccatgatatgcaaacgtattatgatggtgtggcaaaattacgtaagcataatatcaatgtatgtacacacatcattaatggcttacctggcgaagactatgacatgatgatggctactgccaaagaagttgcacaaatggatgtacaaggtattaaaattcatttacttcatttgttaaaaggtacaccgatggtaaaacaatacgataaaggtttattaacttttatgactcaagaagaatacacaaacctagttgtggaccaattagaagtgattccccctgaaatgatcgttcaccgaattaccggtgatggtccaatagatatcatggtcggtccaatgtggagtgttaataaatgggaagtattaaatggcatcgatgctgaattagcacgtagaaattcttatcaaggcttgcgttacaagtctaaggtgaagcaatgaaattagaacgtatactccctttttcaaaaacacttattaaacaacatataacaccagaaagtattgttgtagacgcaacttgcggtaacggcaatgacactttatttttagccgaacaagtaccagaaggacatgtttatggtttcgacattcaagatttagctttggaaaatacacgtgataaagttaaggatttcaattatgtttctttaataaaagatggacatgaaaatattgaacatcatataaatgatgcacataaaggtcatattgatgcagccatctttaacctaggttatttgcctaaaggtgataaatctatcgtgacaaagcctgacacgacaatccaagctattaaagcgttattatctttaatgtcaacggaaggtattatcgtattagttatctatcatggtcatagtgaaggccaacttgaaaagcaagctttgcttgattacttgagtaatttggatcaaaagcatgcgcaagttttgcagtatcaatttttaaatcaacgaaatcatgctccattcatttgtgccatagaaaaaatttcttaagtatttgcttcactattctatttataatttagattgagtagtcaacatttgaaaaattaataccaacaacaaaaagaggttttcattaagttgaaaacctctttttatgctattaaacttacacagcaataattgcgtttaaactattttgcattgctgttgctctacttgcaatcgcatcactgatgaaattcaacaactctactttctcttgttgtaacttttcattgaaatgaataataactgttctttcatcgtcaacaggacgctctttgtaaatccattctaattcaactaaattattatacgttctagtacgcttatacggtttaacttcaacaaatctgtccatttctttaagcgtcatagaacctttttgccataaagttagtaaaattaaaatttcttctctagacattttgtactcgctttcaatctcgctgaaaattgagttaatgtcacccaaaagtgtttctaattgcaaaatcccaaatacagtatcgttatttacttttttcatgctatacatctcccaattaataatcacatatttagctaccatacaagtattaacaaacatcccaacaatcccaaaacttatatgtgctaacttatgcataaaactacaagtgtaaataaacttgctttctattcaattgtctaagttgaataaaattaaataagtataaaaaccaataatcactagagttaatatttagaaataagataatagtacataaaacaaatcactctattacatattaattttataatttatatacaaagaaaatatatcaatattaccattaaattgcaacaattctacatatatttcttcaaaaaagatacgcattgaatttttattacatataactctcatgaaaattgattaaactaaattaattagtaagccttaaatttaacaaattaaaccaaaccgaatgaggctaaattggttatttttcaagatatgatttgtataaatcaaaacatttcttacaaatcaaatgtgtataaaatgtgatatacattctcaaccttaaaaaagtttaaaaaaaagatgagcatctactgtctcatctttttagaatattaaatttctacaatttcgtcatcttcaacaataaagcccattgtattgacgctattatttaagaaagtcagaatataacgcattacttcatcgcgttctggctcattgtgaacctcgtggtaaaaaccttgccaagctttaaaatataattcaggtgtttgatatttttctttaaactcatcaattgccctagtatcaacaattaaatccttcgttccatacattaatagtgttggcattggttgaatgtcatgaatatgagccatcgtatctttcatcgtctcattaattgtgttataccaatgatacgttgctttttttaacattaaaccatcgttaactgtttcttcaacaatttctaaattacgtgttaaatcttttggttctacaccaacattaaaacgtgtgtcttttgaaattttacctatatttgaaacaagtttatctttacgattttttccattcttttgaagttctagcataggagaaattaacatcatcccctcgattggcaattctactttttcaagtaaatttaataaaatcaaaccgccaagtcctacccctaatacataagtaggaattttatattcattagctatctttaaccagtctagcaaactttcgtgatacgtttgaaagttttcaatttgtcctttattagctcttgaagtttgaccttgaccaggcaaatctcccataatcacatgatagccatttcttcttaacatcgtaataacatatgcatatcttcccgtatgttctaatatattatgagcaataacaacgacgcctttcgcatcattttcagcttcccacttccacattattatactgcccctttttcattaatcttcaataacataattatagcaaattcactatgtagatttctatttatagtattattgttgtccatattattatatacaaatgaaatcaacatcaataatagtgtaattatacataattatttttgattgtttttgatgaaaacgctttctcgaatatttttttcatgctaaacttattgtaaacacaagggtttggaggagtagcaatggcactattaaagaatttttttatcggattatctaataatagttttttaaacaacgcagcaaaaaaagtgggcccacgtttgggtgccaataaagtcgttgccggaaatacaattccagagttaattaatacaatcgaatacttaaatgacaagaatatcgctgttacggtagacaatttaggggaatttgtcggtacagttgaagaaagtaatcatgctaaagaacaaattttaacaattatggacgcgcttcatcaacatggcgtaaaggcacatatgtctgttaaattgagtcagttaggtgcagaattcgacttagaattagcttaccaaaatttaagagagattttacttaaagcaaatacttacaacaatatgcatataaatattgatactgaaaaatatgctagcctgcaacaaattgttcaagttttagatcgattaaaaggcgaatttagaaatgttggtactgtaattcaagcatatttatacgatagccatgaattagttgataagtaccaagatttacgattacgtttggttaaaggtgcatataaagaaaacgaatcaattgcatttcaatctaaggaagacgtagatgcaaattacatcaaaataattgaacaacgtttgttaaacgcacgcaatttcacttcaattgcaacacatgaccatcgcattattaatcatgtaaaacaatttatgaaagaaaatcacattgaaaaagatcgtatggaattccaaatgctctatggttttagatcagagttagcagaagaaatcgcaaatgaaggctataatttcactatttatgtaccttatggcgatgattggtttgcttattttatgagaagattagcagaacgcccacaaaacctatctcttgctgtaaaagaatttgtgaaacctgctggcttaaaacgtgttggcataattgcagctttaggagctacagttatgttaggtttaagtacaattaaaaaattatgccgtaaatagagcatggcataaacaataatttaggagtctggaacaataatcaatgttctaggctcctaaatgttatattggcagttctgaatcatttataaatctttgattatgaactcacaacagcactctatgcttatatagattttaataaattagccatttcaattgcacttactgctgcttcggcacctttattgccagctttcgtacctgctctttcaacagcttgttcaatactttcagtcgttaaaataccaaatatgactggtacattagtttgatcatttactttagaaacaccttttgcgacttcattacaaacataatcataatgagaagtagcaccgcgaattacgcatcctaatgtaattactgcatcataatttcctgatgaggctaattttttagctactaaaggaatttcaaacgcaccaggtacatatgctacatcaatattatcttcattaacatcatgtcgaatcaaagtatcttttgcaccttcaagtaatcttccagtgataaaatcattaaatcgactaactacgattgcaactttcaattcttttccaattaatttaccttcaaaattcatgttaaagtcctcctatattaaatgacccatttttatttttttcgtttccatataatcatgattatgtaccgtttctggtacgataacttcaattctttctgcaatatcaatgccatattgtattaatccttcgaatttacttggattattacttaataaattgatatgttcgatgttaaaatattttaatatctgtgcagcaatatgataatctcgcaaatcttcatcaaaacctaatgctaaatttgcagttactgtatcatatccttgctcaattaattcatatgcgcgtaatttgtttaacaatcctatgccacgaccttcttgaggtagataaataatcatgccaccatgttcattgatatacttcatagacgattcaagttgagcaccacaatcacaacgttgactatggaaaatatcgcctgtaaggcacgcagaatgtaaacgtacattttcatgttgtcgaattgcaccttttgtcagtacaactatctcttcatctgtgtaagtagctttaaaaccatacatatcaaatgttccgaaatcagtaggcattttcacttttgccttaaattcaatttctggttctaattttttacgatattcaattaaatcatcaatcgtaatcatctttaattgatgtttttctttaaacttttgtaaatcttgtcctttcgccatcgtgccgtcatcattcataatctcacaaatgacaccagctggcttggcaccagtaagtttagctaaatcaacagccgcttcagtatgaccattacgagctaatacccctttatcttgtgctactaatggaaataaatgaccaggacgattaaaatctttagcttcactacttggatcaatgagctttttggcagtcaatgtacgttcataagcgctaattcctgttgttgtatctacatgatcaatactcactgtaaattgcgtaccaaagatgtcggagttatcatcaaccatttgtaccaaatccaaacgttgtgcaatatctttagacactggtgcgcatattaatccccttgcttctttcgccataaaattaatggtattatcgttcatccattcagtgaccgctactaaatcaccttcattttcacgattctcatcatctactacaataattgtttctccattttttaaagccattaaagcactgtcaatattatcgaattgcatgctacccctcctaaaaaccaaatgctcttaatttatctacagataattggtctttatctttatttaaaatattttcaacatatttaaacaaaacgtctgtttctaaatgtactttatctcctaattttttggatgataaaatcgtagaacgcctcgtttctggaataagatgaatgtcaaaactgttatcatgtttgtcaaataccgttagacttacaccatccacagtaatagatccttgcttaactaactgattattaatatgttggctacattgaatcgtaataattttggcattggctgtttcatttatttttgaaactgttcctagttcatctacatgaccgaggacaaaatgtccaccaaacctaccattaccactcatggcccgctctaaatttacttctgattgtcgcttaacatctgctaaataggttttattttcagtgcctttaattacttgtacagtaaaagatgtctgattaaaatcaatcactgttaaacatgcaccattaacactgatggaatcaccaatatgcatatctgccgtaattttatgtgcttcgatttcaatcgtcctgactgattgacgaatttgaacacttttaacgacacctatttcttcaacgatgccagtaaacatgcatcatcacttctttcgtaaagttaatttgacattttgatttaataactcggaatgaacaatttcaaattggttcgcatctggtatctcaatcacatcatttgtttgataaaattgataatttccagatccgccaattaatttcggggcataatagagaataaattcgtctatataattagattggagaaattctgaagtagtggttggacctgcctcgactagcaaagttccaactcctcttttatataaattgtgaagaattgttgttaaatcacaagacttcaagtaaataatttcaatatgtgtttgattggttgttaaatttggattttcagtatatatccaaattggtgttgattcatcttgataaatttgctgattaaaatgaatattcccagacttagacaatattacttttatagggttttttccatcttgaatacgtgtagtatattgtggatcatctaactcaactgtacgtcttccagttaacactgcgtcgtgtcgatgtcttaacttatagacatcttgtttaacctctttgttagtaatccattgactttgtccattatcattcgcttgtttaccatctaaacttgcagatactttcactgtaatttgtggcagttgctttgcttttgctttaaaaaagtcttggtataattgtgatgcacgttcatcatcaacgcattcaacctcaataccgtgatcccgtaacgtctcatcaccatgtgtatctaacgaattgtcttttgttgcgtaaactactttagctatcttacaatcaattattttgttaacacagggtggcgttgaaccaaaatgactacatggctctaacgtaatataaatcgtcgcaccttcagcattttgttgtgccatatcaagtgcttgaacctccgcatgcttgtcaccttttctcaagtgtgcaccaataccaacaatcctaccttctttaactacaacagcgccaacgggtggattaacacctgtttgaccttgtaccatatttgcaagttgaatcgcataatccataaattgactcaaatgatcacctctataaacaaaaatcctcacatcatgaattaagatgcaaggagaaaaatttatcgttaaataagcctatttgtacacatttttacaaatacgctacattatctttgtcgataattaacattctttctcccatccagactttaactgtcggctctagaatctcactagatcagccactaatatgaagcatattagcaggtcgcaggctttatttactgccggttgggaatttcaccctgccccgaaagaattatatatgaaattgttatagattatttgagtacgtagtatgtcaactacatttaaaatgatactatatgttttctgaaaaaacaattaatgacggttttaatttaatataatctgagtactataggcatctcattgctatgattcttactaacagacattaaaatcaaatcctcaatacgtctctatagagcgttctctttattatcttctagttacaaattattgattgtcacttcgctgttcttgctcattcgattctaaagcatcatataattgagatactgtatgcgcaacttgttctactatcattttcacaccatttcgtagtttattaacaccgtttgtcatttgacctatcgcaatcatatttgttaatgttccaaaccttggactaataacttgattggtttccggtatgatttgtatacctcccattggatgtgcttgtacaatttgtctattttcaagatttttaattaattgatcatcttgatccaattcatttaaatgactttttgcacctgtcgcgttaatgacaactttatatatgtctactgattcttggtttttgtatgaaaaataatacaacttgccatcatgtttcacatcttctaaatcttttttcaaaattaaagacttattttctattaattcaataattagttcagcagttcttggaggcattggatttgaatttaattgaatcatctttgagtatttttgattaaattgatgttggtcttcaatgcttaagctattccatatccaatttaaattctctttcaaatgttcaatgatactttggaaaatgcccatttctgttagacgcgctaaatcatacttcaaatctgcaatatgatttcctgtacgtctatgtactaatttttcaaaatcaatgtcatattcagcacattcttttaaaaataaagaaactaacgtatcaagcggtgcattgccgaaatgatgtttttttatgtcatttaatttgtctttagttaagtacttgaatgtcacgtctatcattgtacctcttacacttggtaaatttgcagaacgactcgtcatagtaattggtaatttcggatgatgagcagcaacataacgaacaacatctaaactggcaaggcctgtaccaataatcgcaatatcgtccagttcatttacttcgtctaacgtattatatgttggataaggtgtagcgatatatccttttttgcccttcaagttatatggatcatggtaagcaaatgtaccacatgttaaaaatacataatcgtacgcttgccatgattgttctgaatttgtagtacatatgtaataagttaaattcgtttcatcgatattagaatttgtataaatctcttgaactttattataattagttgatatatttggatattttttcgtgaacatagataaataagatttcatataatgtccgaatacaaatctcggtaaatatgcaggttcatcaaaattaaaatcagtttgctgtttataccacttccaaaattcagtctcatcatctaaatttaaactcatctttttcgaaggcatattaataagcagctcagaactatcattttgaaatggtacgccctgtcccatatttactttatcatcgtataaatctatatctaattgattaaatttcgggtgcttaactaactctctcaatacacttacaccagcagttcccatgccgattattgctacacgcatatatcatccatcctttagtcattttaaatattttcttttatctattacccatatttatagcaatttggtatttttaataaaatttattaaggtaatctattatttcacttttacaaccactaaaccatttaaaacttttcatttaatatcaaatctagtgtttgtgttaaaatatttttaacaatttgccatattttatgaattcaccattgtcatacttcattacttcatcataattatgattcgttttaaagatgttcattcaatatcgacaactgcttatgtgttaaaatatttttaacgaggtgaattaaattgaaatttatagcaaagatattaatctcattagtaattctatttatgatttttagtcgtaaaaataaagcttcttaatcaatacccttgattacaaaataaattcaactaaggtgattggccatacactcaagatatggctaatcacctttttcaatgcagaataaagagtatattttgcaaaatcaatatttataatttatctttaatacccttttaatactaaaaccaaatttaaattacatagtcatatcgtgaaatataccaaagaaacatagacatttatctatatagatgataatctatttaacgtctaggaggtatgttatgacgtataaagaactagcaacatatttaaaagttttatcagattcaagcagattagaaatactagatttactttcttgtggagagttatgcgcttgtgatttgttagaacattttcaattctctcaacccacacttagctatcatatgaaagcattagtaaaaaccaacttagttacgacacgaaaaatcggaaataaacatttataccagcttaatcataatatttttgagtccgtaattaataacttgtcaaaagttcatacctctaaccaacgatgtatttgtcataaccttaagactggtgaatgctaatgatgacaactttagcgacattcatttttctagtaactttattatttgtattatggcaacctaaaggcctagatattggatttactgcattagcaggtgcctttattgctgttattactggtgttgtaagtttttccgatgttttcgaagtaacaggtatagtctggaatgccactttaacttttgtctcagtcattcttatttcattgatattagataaaattggattttttgaatggtcagcgatccatatgttacatgcttcaaaaggtagtggcctaaaaatgttcgtttatatcatattattgggtgccgtggttgctgcatttttcgcaaatgatggcgcagctttaatcttaacgcccattgtattagcaatggtaaaaaatataggttttagtaagcgggccatatttccatttattattgcaagtggttttattgctgatacaacgtctttacctttaatcgtgagcaatttggtcaatatcatttctgcagattactttaacattagtttctctcaatatcttagtagaatgattatacctaatttattctcacttttagctagccttctagttttgtggttatattttagaaaagcgattcctaaatcatttgatgcaaatcacataaaaaaacctatagatgccattaatgatttaaagctatttaaaatttcatggattgttctagttatattacttttcggctatctaatcagtgaatttactaaaattccggtatcaattttcaccggaatcattgcttttatatttctaatattggctcgtaaatcaaatgctgtaaatattaagcaagtcattaagggcgcaccttggaatatagtattattttcaattggtatgtatatcgtcatattcggcttaagaaatgctggcattactttaatattggctaaaatattagaatatatttccaattacggtctatttagcaccattttgggaatgggcttcatttcagcatttttatcatcaataatgaataatatgcctacagttttaatagatgcgattgctattggtcaatcaaatgtccatggcatgttaaaagaaggcctaatttatgcaaatgttatcggttctgatttaggtccaaaaattacaccgataggctctttagctacattactgtggttacacgtcttaacacaaaaagatgttaagatttcttggggcacatactttaaaactggtatcatcattacaattccagtactatttttcacactcataggattgtatctaacacttatcctattttaagaaataaaaagacgctttctatttattgcgatagaaagcgtctttttatacttgagcaagtcatatcataacttaactctatcaaattatttcttcaaatgtttactgtcatctttatatacaaagtatttgaagtattttccttcagtcttcatgttcttataaaagtcagcgataattgttgcattactttctgcccacttaatatcagtagcatattgatgttctcctggattttttggattccatctcatactatacaatgtattttgatctgtgcttgataagaagtgcttatgaatgaaatcagcaccgcctgaaatagctttttcaggtgtatcccaaccatgctttttagcatattctgcacctgttttaattgggtctttatcaagggctcctactccatagaaattgtagtattttttgccatcaatttcgactccattagctaattcacttttaactgcgccagtttctaataatgcatgtgaaattaaataaacttcgttaacgtgcttatctttagcagcttttaagaaatcatccgtatgtttcaataacgttggtctatcgactaacatacgtttaattctatttttatcaatcccttgatactttgataaatctaaaaattgatatttttgcttttcattatcgataaaagtaccgctatccattgcacttttaatttcagttgcagatgcatctctccatgcatcattctttttatttgatacctgttgactcgtataattatttatttgtttctttgctgcatcgtttaatgtaacatttaacttttcaatcttaatgtcggatttaacatgtttgaaaaatatctgatcggatatcattgagaaaaataaaaatgagacaacagcaaatatgacaacaagtcctattattccaaaaatagaacctttcttgtgtttattcatatccacacctcttaggtcattgttgttatacattcagtttgactacgataataaagtttaacattattaaaaccgtttaacaattttatctatgcattgttacatattcataaataaacggtaatgtaaatgaaacgttttaaacgatttatcaacattactttacgttgattcacgaatcataaatgttttatctttttgtataacctttgaaaacctttatatcaataatcttattattcacgtattaaaaaacaaaaaattctcttgttcgtttacttagtttcttttttataatccatcataataaaacttgctgcatttgatctgtttttataatagtactgatttaaatcaatcgtaccttcaatttgaccatcacgatacatcatttcattagtgaagttatttatcatcacgaaatcagcgcgatctcttataacatctaaatcgtcgtttcgtgcaaaaaaatgttctaaatttaaatgtgcgtaatccattgttacctcccgattacaaattttgttctatctactatttagcaaagtaataatacatcatatcacattaaattaattacttatgtcttatatttaacacttaatttagcgattacgcaaatgaatgatttttctaaatattttattctaattttatccggaaatatttgttatacgtataacttggagaatgactacttgaaatttaatgacgtatacaacaaacaccacaaaatcatacaccatcttttaaaaaaatataatattagctataattatgatgagtattatcaactactcttgataaaaatgtggcaattgagtcagatatataaaccctcaagcaatcaatctttatcctcttttttattcatgcgactaaacttttaccttatcgatctattcagacaacaaaaacgtttaaatgatatcattttatgtgaaaatcattcaccaatacttactgaacagccaacatactttaatgaatatgaccttcgtttacaagatgtttgtgccctactaaaacacagggaacgtcagtggcttatgctttatcttgaaggctataagcaatatgaaattgctgatattatgtcattatcaacttcaacaattaaattaattaaggcatcagttaagcgtaaatgccaacgttttttaaattagtttattgtttaatttcggtcgatgtttttacgatgttgaaacaccctaacatcttcatataaatttattttaaccattaaattaacaacttattatacgaggagtactatatttgcaagacaattctacaaaatacctactttatatccaaactgctacttcaaaccatctcgaaacaaactgtgtctttttacattgcgattacattcttaaagttccaattaacaaactcgtttcatattatgccaaattgcatttatcatcacaaagtgtgctaattgagactgcaaaaaacatactaaatattaataaactggttcccatttacatcaatgcaaaaactatactttttccgttaaaacataaacgtgcaccgatacaaatttatatcaatgcacattatattgttggtatgactgccatagagaattcaacattaatacattttcaagaaggcattcagctagaagttgatgagccattttctctagtttcaaaaaaatgtcatgaaagtttagcattgaagcatttcattgaaaatactaatgaccattaaatttatgttctaacagtttctttgtaaaatatgatgttgtgatttttattaaatagatactaactaacattaataaaatcgctccaatgattgttaaaataacaaccgttgtcgacaaatctactttagggttaacgaaaaattgcacaccagatagacttgtaattaatccaaataaaaacaaacctaataaagcaacgtatgcaaacatcatcactactaatgttacaaagatgctataacttttagattctttactacgaaatacattttctcttaagtacgtattagcaaaggtgattggcttattaaagttcacattgtccttgtcagtaatactagacaaccgttgatctaatgcctgtttttcctttttgttcaaaaaccataattgctttttaacctttttatcgaacgatgctttattcataattaaggatttctctcctttttcatattgacgctattttatacatgattgccaatgaacattgtattttatatattttacagaaatacatgcatcaaatctacaaaaattaactttgcaattttatttttagtaatttgacaccgtataattaacaccgtttatattgcaaacaaaaggttttagttatgtgtaatgatgcgcctttaatcatatctaagtttctcatataatgaaaatgaccataccaatgaaatgctttaatatttattttaaagatgatagaaaggattaaatatgcagaaattcaaggatttgttttatgatgatttatcagttgcacgtggaaattattttctaactttattatccgcattcttgattactattattctactaattggtttcgttgtcagtgatacacatatactttatggcgtgtttatagtgctcatcggtatcgtgttattacggttattcaaaattaatttactctcatttaaaaaattaacaatgtcacaagtgatttatatcatcggtggtgcattgctaatttatgggttagattatctttatttacattttcatgacgtaccgacaaatgaacaagaattagatcgagaattacaacatatgcctttgtatatgtctattgtcacaattgctattatccctgccattgtagaagaaatcgtttttcgaggcatgataataagagttgtatttagaaagcatttatttattggattagttgtgtctagtctagtgtttgcatcattacatgaatcggatacttggattgggtacttaccttatttatattctggagtgatttttggcctaatatatttaaaaacaaagcgattagaagtcgttattttaatccactttataaataacctatcctcattactcattctgctatggggataatactagttgatataatacacaatgattgcccctcaacatgttattcacaaaacgatatgcaatacaaattaataatatacaagcttttaaaacaataaaaaaccttgtataattaacttaattttcataaaaattaaacgtcaaactttattttaggagaattaatatgttttcgaggaataacaatatttttgttgatgatttgtctgtaacaaaggacaattatttaattgcagttttaaaaatgttggtcatttttttagtaattaattatggaacagacgtcagttatgaccatgagtatgttgggctatttattatattactaggtgttgtacttcttaaaattttaaatatcaatttattatctttcaaaaaattaaaattcactcatatgctttatattatatttggatttttattgatgtatggattagattacttatatgatacgttcgcaccgcctacattaaatgaaatattgatagatgaagagtctgaagatgcaccttaccacatagctctgcttagtactgctatcattccaccaattacagaagaaatcatctgtcgtggattgattatacgaattttattcagaaatcatcttttcttaggttttattgtttcaactgtattcttcacgctaatacatgaatcagacacgctgattggttatcttccgtatttttattcaggtttaatttttggctatacttacttaaaaacaaaacgattagaggtaccgattttaatacattttatcaataacctcttagccatgtaacaataaaatcattaattattttgatatttacatgatgacaccaaagcttttacaaagtattaataggtgactttccaaatgttattgcatatttacgttctgtaattatatcaaaacaacaaaacatattaagtttagctatgaaaaaaatctatgacgatagtttttttcatagctattttttatagttattgagcctatcccagactctctatactggtatattagcaatcattgactgaatgataatacgcttttcaattataggggccccaacacagagaatttcgacaagaaattctacaagcaatgcgcgttggggtgtggggccccaacatagagaatttcaaaaaagaaattctacaggcaatgcgcgttggggtgtggggcctcaacataggaaagatcagctcacattaatgtgcaagatggcggtgcccaacatagagaaattgtatttcaatttctacaggcaatgaaatacatattaatttaaaattgactccaatatgaaaaacccccataagcacaatgcctatgagggtttaaatatatttatatattataaaatagaaagacctgaagattgaatatctttcgcaaagcctttaactgtatctactgataattcgttaatatcgcgacctaagtttgtgttcacttttttcacaacatctgctgggcatgtaataatatctgcaccaatttcatcagcttgaatcacattgaataattcgcggcaacttgcccataataatttaacgccgtctttactatgcgtaacttttacagcctctttcattaatggtaatggatctacgcctgtatctgcaatacgtcctgcaaatactgaaacatatgttggcacaccttcagttactgcttcagttatttctttaacttgttcaattgtataaacagctgtaacgtttaatctcacattgtcagctgaaagttttttaattaaaggaatcgttgattcaccttttgtatttacaataggaattttaacaaatacattttcgccatattgttttaaaattgctgcttctttttccatagtttctaaatcgtctgcaaatacttcaaatgaaattgaagcgtctggaatttctttcacagcttcttcagcaaaagctttgtaatctgttacgcccgctttcgccattaaactaggatttgttgtaaaaccatccacttgtttgtttttataagctgctttcatttcttcaatatctgcaccatccgcaaatacttctacatttagtttagccatataatatagcctccttgattcttattaaaattttaacaacatctgcatgtctttttcttacaaccatttgtaaaaaatgatttttatttctttgttatataaaacatttatatcacgcttttataatatatagctaattttttgcctatatttcttaaaaatgactttagcaacattgtgtcaacaaggtaattaaactattgttttatgattgtttatgatacgatatgtaaatgataaccatctaggaggtctagcatgtctcgttcaaaaaaatacttttacttatctagcttaatgattattttaagctttttctttaatacaaataacgttttcctaagtgggctttttaattcttttattaaattaatacttttctgcagtgttattaactcaattatactgatattgtctataatttttgcagatcgttcaattaaatcactaaagcctgatgcagattggattagaattgcgagtaaaagtttgccttggattattctaatcgttattttagtacatatcttttcgattgttcacacattcggttttatttaaaaaagataaaatgtcaatgtagccttaatacaaaacaatacaatgtatcatgctataataagtaaatcaatttgatgacgttgttgcatataaaaaatattagattttcgaaatcataactatgcatctaatcgctatagttatacaacaagatataacatataatgaggtttgataatgcatcgacaatttttgtcgtcgcgttgccaaaacctcttttttaattcaaactacttcttttcgaggtgaaccaaatgcaatatgtatatatttttatcggtggtgctttaggcgctttattacgttacctcatttcttttctaaatactgacggaggtttcccaatcggaacactgatagccaatttgactggtgcctttgtaatgggattgctaacagccttaacaattgaatttttttcaaaccatccaaccctaaaaaaagctattacgactggttttcttggtgctttaacgactttttcaacatttcaattagaattaatacatatgtttgattatcaacaatttataactttactactatatgctgtaacaagttatgtctttggtattttgttatgttatgtcggtataaaactaggtggtggtttatcatgatatcaatcattttagtcatgattggcggcggtttgggtgcaattgctagaagtgccgttactgattattttaatcatatatttacttccaagttacctatcgcaacattgatagtaaatcttgttggtagttttttaattggattaactataggcttatcaatttcaatctcatggttccctgcgttctttgttaccggttttttaggtggcttaacaactttctcaacattagccaaggaacttacattaatgatgacaccaaaatttgatattaagctttttctcaattattcacttttacaattcatcattggatttatagcttgttatattggctatcatatttaaaaataaaatgcttcattcagcaaataggtaaattacgacaccttcctgaacgaagcattttttaattttcatgcaaattttttagcaccatataatgcctatcaaaataaaacaatctttgttgccgtttaaataatgtgaatatcaacaaattctccaaactagtcgaaaataaaacgttaagcaatatgtctattacctaacgttgacaatttatctgaccatatcaaaaattcaccgatttgtttcctatccttcaaaagtttttggatcaggtccaattctcttatcttgatttaaatcatcaattcgcgtcatttgttcatctgataattcgaaatcaaatattcggaagttttcagagattctgtttggtgtcaccgatttagggattgtaaccacaccatgctgcacattccatcttaaaacaacttgggcaggtgactttcctaattcttgagcaatgtctttaattgtctcatcatttaaaatttgtgcattcatcaatggtgaccaagattccatcacgatatgttgtgctgccaaatataatttcaatttatgttgcgttaaatatggatgatattcaacctgattaattacaggttttattgacacttgtgccaacaaagcttccaaatgttcaggttcaaaattgctgacacctatatttttaactttattatttttatataaatcttccatacctttccatgtatcaaccattatggcttcgttcgtacctggccaatgtactagatacaaatctaagtattttaaacctaatctagataaactagcttcgtaagcagctgctacattttcacgaccaaaatcctcaaaatataattttgaagtaataaataagtcttctctagcaataccagttgattccaatccggcacgaatgccagcacctacttgttcttcattcccataaacttttgcggtatcaatactacgatatccttgttcaatggcatacttaacactttccatgcaattttcatcattttccacacgaaatgtccctaaaccaatttgtggcatcgtgtttccattataaaatgttttaacctccataaatatcgcctcacctttttgatgtattataccctgttatcataacaaatctgagttgaatacatgagaaaaaacacttatagcaatcaaccactaaaattctagtaatatctctcaaatattaatcaaattgtaaaagtaattctgtttaatttatgacaaactaaaaaagccgaagtaacaacatatagtcatcacttcagcctaacatttaattgaatgattcaattttatccatcatttgttgtaagtcttccacattgtattgaatacgaccatggaatacaaatttgttaaagaactcgtctaattgttcagcaccgacaagcactttgacagcactattttgattataatttgaaatcgttacatcgccttcatttttaggattaaagtataaaattgaagtcggtgtatatttagcacctaaatgtttttgtaagtcttcagccaattgtttaatcgcctcaatttgatctgaataatttacaaatgataatgaacgtttgtcatcattttgatccatcacaatagtttgcggtctagatttatctaaatccaatgtatcaaatacttgttccataggtggtaaatctttaaattgaccgccactgataccattatatacatgacctttcaacaattgggaatcaatgatataaagaccagttcttgttaatactaaatgactaatacgttcaatattattaaagccatcctttggtaaaaagatatttgccataatgtgcatatcttctggtcgaattcgtttttctttaactaatctttcacgaataccaattaatctcatgtccgttacatattcactatgatttttcgagaacaattttaatgcgtcaatctcacgatcttttgtactaatcatgtgattataatcttcttgttgttttgtaattgtctttttattttgaatacgctctttctctaaagcttcttcatgagactttttaatgttttgttcttgttgttcatacttttcttctgtttgtcgcttaacttttttcttactacctaaggcaactaagaaaaggacaaaaaagattaatgcaatgactactgcaataatgagtccaatgactaccggtgaagataaatccatcacaacaacgctcctttttaatatatgaataactttaattataatagaaaagctaaagattttcgatacatattatcatttatataccgaaaatcttttatttagctatattcaattcatcttattattttactgcgtcttttaattcttccactttgtctaatttttcccatgggaataagacatctgtacgtccaaagtgaccataagcagcagtttgtttgtaaatcggttgtttcaaatcaagcattttaataatacctgcaggtcttaggtcaaagtgttttctaactgcttcgacaagttgtccttcagaaactttacctgttccaaatgtatcaattgcaattgacactggttctgcaacaccaatcgcatatgccaattgtacttcacattgatctgctaaacctgctgctacaatatttttagccacataacgtgcagcgtatgcagctgaacggtctacttttgtaggatctttaccgctaaagcatccgccaccatgacgtgcatagccaccgtacgtatcaacaatgattttacgtcctgttaatcctgcatcaccttgaggtccaccgattacaaagcgtcctgtaggattgatgtagaatttagtttgttcattaatcaagttttctggaacagttggataaatgacatgagctttaatgtcttcttgaatttgttcaagtgtcacatcctcagcatgttgtgttgatacgacaatcgtatcaatacgtacagggttatcattttcatcatattcaacagtgacctgaactttaccgtctggtcgtaaataatttaacgtgccatctttacgcacatctgataaacgttttgccaattgatgtgataaataaattgctagaggcatatacgtttctgtttcattcgttgcgtaaccgaacattaaaccttggtcacctgcacctgttgcttcaatttcttcttcgctatctttatcacgatactctaatgctttatccacaccttgtgcaatatcaggtgattgttcatcaatcgcagttaaaattgccattgtttcataatcatagccatattttgctcttgtgtatccaatttctttgattgtttctctaacaactttcggaatatcaacatatgttgttgtagaaatttcgccggcgatcaatgccatacctgttgtaacagttgtttcacaagctacacgtgcatttgggtcgtcttttaaaatagcatctaatattgcatctgacacttggtcagcgattttatctgggtgtccttctgtaacagactctgaagtaaataatcgtttgttatttaacatagtttgctcctttaaatttatattacgaaaattctctctctgtgagctaaataaaaaagaccttctaactattaatatagagagaaggcctaatacgtccattcgctcttatcgttcagacctatttgtctgcaaacggtttggcacctttcttttataaaaaaggaggttgctgggtttcattgggtccatgtccctccaccactcaggataagagaatccgttaaaaataatactacctaattaatgaattaatgtcaatttttcacatataaatttacagtaaaatattgtagattaattatgttaatgtgttatactaattaaatgtaaaggcttacatttaaattatcgctttggagggatttaggatgtcagtagacacatacactgaaacaactaaaattgacaaattactgaaaaaaccaacgtcacattttcaactttcgacgacacaactttataataaaatcttagacaataacgaaggggtattaacagaacttggtgctgttaatgcgagtactggaaaatatactggtcgttcgcctaaagacaaattttttgtctctgaaccttcatatagagataacattgattggggagaaattaatcaacctatcgatgaagaaactttcttgaagttataccataaagtactagactatttagataaaaaagatgaattatacgtatttaaaggctacgctggtagcgataaagatacaatgttaaaacttacagtcatcaacgaattagcatggcataatttatttgctaaaaatatgtttattagacctgaatcaaaagaagaagctacaaaaattaaacctaacttcactatcgtttctgccccacattttaaagcagatccagaagttgatggtactaaatctgaaacctttgtcattatttcatttaaacacaaagtcattttaatcggcggtactgaatacgctggtgaaatgaaaaaaggtatcttctctgtaatgaattacttattgccgatgcaagatattatgagcatgcattgctcagcaaacgttggtgaaaaaggcgatgttgcattattctttggtctatctggcactggtaaaacaaccttatcggccgacccacaccgtaaactaatcggtgatgatgaacacggctggaataaaaacggggtctttaatatcgaaggtggctgctatgcaaaagcaattaatctttccaaagaaaaagaaccacagatttttgacgcaatcaaatatggtgcaatcctagaaaacacggttgtttcagaagatggttcagtggactttgaagataatcgttatacagaaaatacgcgtgcggcatatccaattaatcacattgacaatattgtagtaccatcaaaagcagcacatccaaatacaattattttcttaactgcggatgcatttggtgttattccaccgatttcaaagttaaataaagaccaagcaatgtatcatttcttgagtggtttcacttctaaattagctggtacagagcgtggtgtgacagaacctgaaccatcattctcaacatgtttcggcgcaccgttcttcccgttacaccctactgtttacgctgatttattaggtgaacttatcgatttacatgatgttgatgtttatcttgttaatactggatggactggcggaaaatatggtgtaggacgtagaatcagcttacattacacacgtcaaatggtaaaccaagcgatttctggtaaattgaaaaatgcaaaatatacaaaagatagtacgtttggtttaagcattcctgtagaaattgaagatgtaccgaaaacaattttaaatccaattaatgcttggagcgacaaagagaaatataaagcacaagcagaagatttaattcaacgttttgaaaagaacttcgaaaaatttggtgaaaaagttgaacatattgctgaaaaaggtagcttcaacaaataactttgcatactaattaaagagccaaccattgttatagtctaacaatggttggctcctcttattttatatggtaaaaatttataggcatttttattacaaccatgcacatttaaggtgaccttcatgccaaactcacatcactcattcaatggaagcagcacgtcttcacataaagtaccgatcccttacgcattgcatgttgccccactttgcataaagcgtgtaccgctcattcaacacatgaagcaccacatcttcaaggcttgatagttcccatgcgcacaccacgtttcatactacctatgcaactcaacttggttcataaattctttaatataagtcaatgtttcaaccatcgctggtggtcttggcacatgtccttctgccatttgataaaatgtttcatgcgcagcaccttttaactctagttggtccgctaaataatacgcatgatgaataccaacttgctggtctttccctccatgtacaattaatattggtggactgttttcattaatgtttggaatcgcttgacgtgcctcatatgccgctcgatcttttttcggatgaccaatcattcttcgtaacatccctcttaaatcaacgcgctcttcatacatcaaatcaatatctgagactccaccccagatgatataactacttactggtagatcttgaaacgtcaacaacccttgtagtccacctcttgaaaaaccaaccatatgaatgaaagcttgcggatatttatcatgtagcaatcttaatagttgcgtcacatcatttaaatcgccacgataaaattcatctttaccttcactcccattgttacctcggtagtatggcccgatcactaaagtttgactatctgaaaattgcattaatctacctgcgcgcacacgtcctacttggcctttgccacctcgcaaatatactacaatgcgttttacttcatgatgtggtgtcatcattaaagcttttacttgtaagtcatctgacaaatatgtaatttcttcgaattgatgcgtaaaagattcaattggcattcgtttacgtttgataaaatccaagtgattgcaccctctctacgcattttaaaatggtactatcttgcagtaagaaactccgttgtgcgagttcaatatcattgatacagttaaacaacactggccctgctgtttctaaataatcgttcttgcttaccaatgattcaacttcgataaaatatacatcttttacaaaatcagtttgatcatgtgtttcaatggtatattgtgctatgtaatgaatatttttaactttggcgcctgtttcttcatataattcacgggtaactgcttcagcactactttccccgcgttcccttttaccaccaggaaattcaataccccgtaaattatgtttggtaaaaagcaattgatttttaaacgttggaatagctagcacatgattgccatctgctatctcattatcctttttaaatgtcaaattaacttgacgattatctttatccctaaacttcacgcgcatcacatccctacattgtatgttaatataatagttaattactatcgttggaggcattaattatgaaaaagatattcttggcgatgatacatttttatcaacgtttcatttcgccactcactccaccaacttgtcgtttttatccaacatgttcagagtacactagagaagcgattcaataccacggtgctttcaaaggcctttatttaggcatccgtcgtattttaaaatgtcatccgcttcataaaggtggctttgacccagttccgttaaaaaaagacaagtcagcaagcaagcattcacataaacataaccattaatatggttgtaattgagttatatctactaaaggggggcgaaattcgagtcgcccctcttttaatatgcctgaatgcgccaccacatcttgttcaaaataataacctgctggtgtaacatctcctggataatcacctttacgagcaagcatcgctgtaaaataacggcttaaaccatattcgtacatgccgccaattaccacttttacaccatgactttttaaagtatcaattgccgtttgcactttatcaatgccacctagacgaaatggttttaatacaacaactttcacattgtataattctatcaaattaattatggccgacagtgacgtcgccttttcatcaagagcgattggaggagttttttcagccactacttcatcaatcattgaaatttctttaaatggctcttcgatataaagtatattttcatgtgctaataattgtaactgtgtcatgtcttgacgggtcaatgactcatttgcatctataactaattgaaactgaaagtttaactcacgtaacgattttatttgatctataatttgaggcgtccattttaatttaattctggcaggttttgtttctttcaaggcagctagttgtttgttagataacccacttactgtcgcaccatatgctactgaaaatgacggtaaagtgtgaaacatttgatacaatgccatgacaacagttgctcttgcagcaggagtatcttccaaaggtgacaataactcaagtgccgcttcatacgattcgaatgatttatttttaatatctatgaaccattgttgaagtgcttcttttactgaatcaatcgtttcaaaatcataccaatctgtttgaaaagcgttacattccccgaaatatgcattgcctttatcatcaattatttcaataaacaaacaatcacgatgagttaaagtgactttcggagttacaattttagacttaaatggttcactatatttataaaaatgcacagccgtcaatttcactaaatcaccctctattcaacttattcctttgtaatttaccagtcgatgtatatggtaaagtatcaaccttttcaaagtatttcggtactttatatttcgctaaatgctgagacaaatatgcaatcaattgcacttcagaaatgtcactttcactgacaaaatataatttaggtacttgtccccaagtatcatcaggatgccctacacatactgcgtcactgatacctggaaattgcttcgctaccgtttcaatttgatatggataaatattttcaccgccactaataattaaatctttacgtcggtcataaatcatgacataacctgcatgatctatttcagcaatgtcacccgtattaaaataaccattttcaaacgtatccgttaaatctgttggatacaaatatccattcattacattggcgcctttaatcattaattctccatgaccttctttattaggatttttaatttttacgtcaacattggcacttggcatgccaacggtatcaggacgttcatgcaacatttccggtgttgctgttaaaaattgcgaacatgtctcagtcataccaaatgaattataaattggcaggttatattgtaatgccgtctctatcatagtggcagataatttagcaccgccgagtaatattttttgtaaatcataaggttcatgcaaaccttgttgcataagccaatttaaagtttgtggcacaagcgaaatgtgcgtgatgcgttcattttttatcatcgttaaaatttgttcggcattgaatttatcaacaatgcgcacagtaaacccttcaataacagctcttaaaagtacactgagacccgaaatatgataaatcggcaagacagatagccaattagtatcacgatcaaatcccaagctctctttacatccgattgcactggcataatgattacgaaacgtttgtggcaccgctttttgagggccagttgtccctgatgtaaacataatcgatgcaatgtcatctaaattaaatgatgtatttaatatgttggacggcgaacctttcggcaccacagtttcattagatgtatcatattggatgcccaatgtgttgtccattaaatcgttcattgtaatatccgttccagcgaattcaatatcatccaacgatacaatttgaaaccctcgcaattccagtggcaaggtacaaaaaatcaattgtacatcaattgacctcatctgatttgtcatctcattaggtgtcaaccttgtattaatcatcgcaatttcaatatttgccaaccaacatgcatgtattaaaatgatcgattgaatcgaattatctatgtataacccgacacgagattgttgataagtcttgagtcttttagccaatagactcgcttcacagtataaattttgataagtataagattcttgaccgtctgttatcgcaatatgatgtccattttgttgtgcttgtttatataaccaaaagtccatgcgctattcctccaaaatcatttacattataattataacgattttatgacattctagcagtgcttatgtttaaaaatataaaaaagtagacgaattgattcattgatatgattgttataatgctcaatacatatcgttatatcattcgtctactattatcagttatttttatttaattttagtgtcattctgtcattctgatgtggtgatttatccattgttgccacatcatctgcaatgtcaatcggtctatgattcatatcttgtaatgcacttaaatgaaatagttcatcatctaaattttcaatgagatatacataatatgttaccttgtcctttttatattttaacgttttccaaaagtccggcttgcaattcaatacattatccggaatatattcaataaataagtaacgtttgctgcctactttgtctacgaaatattttacagtgcctttttctatacctcttatatgtgcatagtctgctgaaaagtaaatactacctattgtttcattatgttgttgtatttcaaatcgttggcctactattttattatttgtgccacaactacttaaaaaaatcagtagatatagcattaaacatattttcatccccttgaattttaaaaactttttcaaaagcaacacctctaaaaataaatacaatatattatatcaaatagaaattattattttgttaaattatgttgtcatgttcgtgtcattttgagtcgtaatacaactttacaattattaaattaacacttctacaatccaaaaatatttttaaagttttgaaaaaaattaaagtatttccactactaatttggtaaaatatgattatgtgatatagtgaaagcgttttacactaaataattccctcttaaatgcatccaggttttatgtagtaaatcatgaaaataacatataaatatagaggagatttacctttgaatacagagaacaacaagaatcaaaaccaatctgctaaaaattctgaaagacgtggcatgttaaaaggatgcggcggttgccttatttcttttattttattaattatcttattatcagcctgttcaatgatgtttagtaataatgacaattccactagtaatgaatcatcaaaaacgcaattaactcaaaaagacgaagataaaagtgaaaatatgcctgaagaaaaatcagaatcagaaacagataaggatttacaatcaaccgaagaagtacccgcaaatgaaaacactgaaaataatcaacatgaaattgatgaaataacaacaacagatcaatcagatgatgaaattaacacaccaaacgttgcagaagataaatcacaagacgacttgaaagatgatttgaaagatgatttaaaagaaaagcaacaaccaagtgaccatcatcaatccacgcaacctaagacttcaccatcaactgaaacaaacaagcaacaatcatttgctaattgtaagcaacttagacaagtatatccgaatggtgtcactgccgatcatccagcatatcgaccacatttagatagagataaagataaacgtgcatgtgaacctgataaatattaaacaacaagcgaattgaattcaaattgtatttagctttatgcactaatcacatagtaaataatgagggagattttttaggcatgagcaatcaattcaaaagcgaagaagagcgaagacaatgggaacaattccaagctttccaaaatcaacaaaaccaacagcaccagcaatacggacaaaagaaatctaaaaaaggatggttctggggctgtggtggttgtctagtattatttattttaattatcatcggtatttcagcttgtacagctggtgtcactggtaaccttggcggaaatagttctaaagaaacgaacaaaacccataaaatcggtgaaactgttaaaaatggcgaccttgaagtcactgtaaattcagtggaaactatgaaatctgtaggaccatctcttgcaccaacaaacgctaaaggtatatttgtcgttgctgatgtgacgattaaaaacaaaggtaaagaagcgttaacaattgatagttcaatgtttaagctaaaatccggtgataaaacatttgaagcagataatacaggttcaatgtctgctaatcaaaatgacaatggtagtatagaaaattcatttttcttacagcgtataaatccagatagcactgctcaaggtaaaattgttttcgatgtgtcagaaaacatagccaacgcaaaagataaaaaattagaagttatttctagtttatttagcgtcaagaagattacatttgatttatccgatgctaaaaaaacatcaaaagctaaaaaagacaagcaagatacagaagtagctgttgcgagttcaaatagcgataatgtaagttatgaagcttcggctactacacctgctacaacttctagtgcggatactgattctgaagatagcgaaaagtctagtaaagatgaggataagcagaatgcgtctaaaagtgataaatctagtgtagaaaaaagtgaatctaatgaggaaactgctcctgtagagcctatgcgccagagcaaacctaccactagtgaagcaccacctagccaaaatattcacaatgaagatagcatgtacgacgcttcaacagaataaaatttcagggtagctcggctacccttcttttacggaaaaattaattatacataatcaaatcaaggagataaaaaaatgaaattcaaagctatcgttgcaatcacattatcattgtcactattaactgcctgtggtgctaatcaacataaagaaaatagtagtaaatcaaatgacactaataaaaagacgcaacaaactgacaacactacacagtcaaatagagaaaagcaaatgacaccacaagaagccgaagatatcgttcgaaacgattacaaagcaagaggtgttaatgaatatcaaacattaaattttaaaacaaatcttgaacgaagtaatgaacatgaatattatgttgaacatttagtccgcgatgcagttggcacacctttaaaacgttgcgctattgttaatcgacacaatggtacgattattaatatttttgatgatatgtcagaaaaagataaagaagaatttgaagcatttaaaaagagaagccctaaatacaacccaggtatgagtgatcaagctgaaacggataatgagtcggaagacattcaacatcatgatattgacaataacaaagccattcaaaatgatacaccaaatcaaaaagtcgatgataaaaacgataaaaatgctgataataaagaagaaaaacacgataaccgtgaaaataattcagcagaaactaaagttaaataagggtatactttgattaattgtaatttttaggagaaacgctatgataacatttgagaatatacaacaacttgagaaatacaccttaatgactatgcatggtctttttaatcaacttaaactcggtattatttcaatcgacaatgcagagcatacgctctttacaccttatatgatggaaacactctcttccctaggtgtgaaacgagacattatcaatttaattcacaaagggacagagttagaagactttgcggcatttaatttatcaattgaagatacagttacagtctgtttacaaagaactgaagaactattaaatcaatacaaaaatgtggaattcaatgacaaaatattaatcaattggcgcattatgcaagagaaatagacatataaaagtcgaacgtaactatgtggatattgattttattctttctaaattacaagtatttcattttataaagtttgaaaagaggtatattgaaatggagaaaaacgaatatacagctaaatataatgaatatagtcaattattagacgttacttactcgcaagctgtagcataccttttaaataaatatggcgctgtaaccgatgactattataaggaaaaatcatacacacgatttttaaatggagaaatcaaaagtatttcaaaaggaaaatacactagagctagcgaaggattatattgtcatcacataagcgaggacaaattccaaaacttatctgacctaagattcatttccgaatttaagtactcatacaattatcaaaagaaagaaaacttagtttactgcgatttaatcgagcatttaattttacatgcaattattacaaaagaatccaatggccaatttggcgtggctggattatgtcaaatgatcaaaccaacagtcattgattggtacattggcgaatataatccaaaaccagcatggatgcaagccaccaaagcacgtgcctatttgcctagaatattagtagagaaattactcattaaaattgacgatatgttaaaaggaatagaaatatatgatttccttgagtcgcgataaatgattaatggatatttattttttgctgttgggattttgttatagatgtttaaacccgtaattaaatatattttataaaaatagaccacgcatacctatctataaacggacaatgtttataaatgagtttgcatggtcttgaattgtattagttttcttttggttttaataaatcgactagattttcacaatatttatcaaatatgtattcctaaattatacagccttaatccagcagctactttcgaaacttccaacttagttgatataaggttcaatagtttgtttcgttctttttcagataaaccagaacttaaattgatattattgacttcataaaaattatagactaatgcctctatttgctttttaggcataagtaagtcgactgaaaactgatttacgtcgctttcataaatcatttcatgcaaattctttagactattatcgttgttatctttaattttgtataaataacggccgagttcacgagctattgcaaatcttgtattattaatcgagagattattattgatataaatcgttcttccacttaaataacccgaagtattactctccattttaatatatttaacttttaaattaagttgaaataataccttgtctatgtcaatagcaaaatgttcagaagtaataaaaagttgatccattttgtccttaactaatgactgaattaattgaactatttttggttctaaaaaatcttcataatgaactttctcaataactttcaattgattcccctccctaactaaaaaattgaacctacatcatttaataaatttaaaaatataggtgtaaacattattaaaataaaactcctccactactaaatgtaacggagggacatgatttcaaaataaaatacctttttttataaatttattataatattttccattatactgtacaaccgaatctaatccaacgatcccgaaaagaagaacaacggtggctcggcttcatattcattttgtccaagtgttctttttcaattatttgattgacggttttccaattttttacttcttgctcttttaaaaaatggctatgaaaaattctatcctcatagatttttcatagccaatgctaatttgtttcatgttatttctttaaaattcctaaaaatatataaactaaaagcataagtaacacagcaaaaattgccgaatatataattattgaaaaagcattgctttgcattggaactaaataatttaaagtacaaaataataataatgctaaaattccaactttaagtgaatattttaatctatccataaaatcacccttactgatatccccatttttctcctatcagaacgtattcccaggctgcattctttttagtttttaattttaaatatattcccttactagtatcaatattcgatgcagctatagatccaaggaaaccaccaacacctgcgccaactaaacctcctgttagtgcagaaataacgctaatagcccccgcacctaaagcagctattgtttttgtatatgcagaagaaagatataatgttgcagtatctttacctgtttctacatattgagttttacccgctctcaattggtcttcagctttatatttttttatttcttcttttgtaaatatatcttccagtttataaccttttttctcaagttcatcaaataaattttggttactcaaatatattacctttgcttgagaatggtctaacttatcttcagcatgagctacatctgaattataagataatgaaattggactaacaaataatacaccagcagctaataataaagatttttaattcgtttttcattagtttctttttgatgatttttgtatttagctttcgtataaacagaaactagattatgttttatcatgatacgacctatctttcgtcttgatacagtgagacccttatcatttaaattattttcaattcgtcttgtaccaaagacctttctattagaattaaaaatatttatgacggcacgttctatgtttgaatcatctttagtgattttattatcttttctttttatagaatcataataagtacttcttagtatttttaggactttacacattgctggtactgaatattgatgtgcattcttttgaatgacttctatttttgtcccataatcagcgctgcttgctttaaaatatcgttctccatttttaaatgttgaacttctttacgtaatttaatcagctctttttcttcatctgataagttatcatggtgattgaatgtacccgtgttttgatgttgctttatccattttcctaacgccgaaggtgttaaatcatactcgcgtataatttcatttctaggcttaccattttcatataatctaaccatttgtaacttaaactctgaactaaatgatcttctttctcttgtcataataaaatcgcctactttcttaaattaacaatatctattctcatagaatttgtccaattaagtgtagacgattcaaactttcatagagctataatgattaaggttatacttaaaatataaatctattctcttttcttgcgtctcaatataatgatcttttttatgcttatggatcacacatgccacgactagcaaacctattataattactacaactattattaaaatatatttctttttcatcactctaatctccccgaaaagaagaataatggtggttccgctacataatcacttttatccaaatgttctttttcaattatttcatcaacatttaatctgtctttagcatctttttctctaaataattcacctattttatcctctttataacctaaatctcctttaaattgtttattagtatcagaaaatatcacagcatcaaatttataattatttttattattgacaaagccctttataaaataaccacccattggattctttttaaaacttgtaactttcatagaactataattattaaggttatacttaaaatacaaatctatacgcttttcttgcgtctcaatgtaataatcttttctatgtttatgagtcacacatgccacgactaccaaacctattataattactacaactacttttaagatatatttctttttcatcactctaatctccccgaaaagaagaataacggtggatcggcttcatattcacttttgtctaagtgttctttttcaattatttcatcgactgagagtttatatttagggtctttttctttgaataatttgcctaatttatcttcatggtaaccaatatctttctgatattgattattgcttcccgaatctatacttgcttggaatttatattttttatcatcatttatataacctacaatgaaatacccacccatcggagttttatggaaatctgtcactttcatatttttataattgttaagattatgcttaaaatacaaatcgattcgtttttcttgtgtcttaatgtaatgagcctttatttgtttattatgcgcataagcaataacaattagacctattaatattgcaacaactaccacaaatacatatctctttttcattttaaccccctagtgtagtatttatttcttatagattttaaatttcaaaaaaacaatttactttgacatgctatcttttttcaatgttccgtatacgccctcaagaaaagttgtttcaaaatacttttaataattactcgctttacatcgtaataaatacataaagtcgcgcagttttgcatttcgcattatatataaaatagcaatcttattataaatataaattaatatcttctaggttcacttaccattttattacttaaaccaaaatttgtctcatttctaacatttcacattacatcaattttaattattttaaatattgtataacttaattatttaaaatgttataatcgataagattgttaatatttaattttccaattttaatttctttacttttttagatattaaataaatctgatggtgactgatggtttccatgcatcaacgaatttcccaatcctttggaaagttgaatcattaattaatcataatatcaattgcatacacgcaaaaaaaggagacatgtcaatgacatataaaatgaagaaatggcaaaaattatccaccattacgttattaatggccggagtgattactttaaataatggtgaatttagaaatgttgataaacatcaaattgctgtggctgatacgaatgttcaaacgccagattatgaaaaattgaagaagacgtggctcgacgttaactacggttatgatcagtatgatgagaataatcaagatatgaagaagaagtttgatgctaaagaaaaagaagctaaaaagttacttgaagatatgaaaactgatacaaatagaacatatttgtgggatagtgcaaaagatttggataaaaagtccgcagacatgacaaaaacctatcgtaatatcgagaaaatcgcagaagcaatgcgacataaaaatacttcattaaaaacagatgaaaacaagttgaaaataacagatgcaattaagtggttacatcataacgtatatggtaaggatccagataagaaagtcacagatttaaccaccaatcgtaaagaaaaagattctagtaaaaagaataactcattgaattggtgggattatgaaattggtacgccaagagcattaacaaacacactacttctaatggacgatatgctcactaaagatgaaatgaaaaattattcaaaacctattagtacatatgcaccatccagtgacaaaattttatcttctgttggtgaatcagaagatgctaaaggtggaaatttagtagacatttctaaagtaaaacttttagaaagtgttattgaagaagatgaaactatgatgaaaaattcaatagattcatttaataaagtgttcacttatgttcaagattctgccactggtaaagctcgcaatggattctataaagatggctcttacattgatcatcaagatgtcccttacactggcgcttatggtgttgtactattagagggtatttctcaaatgatgccgatgataaaagaatctccttttaaacatacacaagataaagctacattaagcaattggattgacgaaggttttatgccattaatctataaaggtgaaatgatggatttatcaagaggtagagctatcagtcgtgaaaatgaaacgagtcatacagcgtcagcaactgtaatgaaatcattgttgagattgagtgataccatggatgattcaacaaaagctaaatataagcaaatcgtcaaaacttctgttaattctgattcaagttacaaccaaaatgattatttaaattcatattcagacatagataaaatgaaaaagttaatggatgatagcactatttctaaaaatgatttaacacaacaacttaaaatatataatgacatggatcgtgtcacctatcacaataaagaccttgactttgcatttggattaagtatgacatcgaaaaacgtcgcacgttacgaaagtatcaataatgaaaacttaaaaggttggcacaccggtgcaggcatgtcttatttatataacagcgatgtcaaacactatcgtgataacttttgggcaacagccgatatgacttgtcttccaggcactactactttaaatgatatgccatctactaatactaagaatgataaatcctttgttggcgggacaaaattaaataataaatacgcaagcatcggtatggattttgaaaatcaggacaaaactttaactgccaaaaaatcatatttcatattaaacgataaaattgtcttcataggaactggcattaaaagtactgattcatcaaagaatccagttacaagtgttgaaaatcgcaaagcagttgggtataaattatttaaaggtgatattgaaattaccacttcagatgttaatgctcaggaaacccattcagtctttttagagtccaacgatacaaaaaagaacattggttatcatttcttagacaagccaaaaataactgtaaaaaaagaaagtcatactggtaagtggagtgaaattaataaaagtcaaaaaacagatgacaaaaaagatgagtattatgaagtaactcaaacacataatacatctgacagtaaatatgcatatgttttgtatcctggtttatcaaaaagtgattttaaatcgaagaataataatgtaagtattgttaaacaagatgaagattttcatgtgataaaagataatgatggcgtatttgctggggttaattatagtgatagtactaaatcttttgatataaacggaactattgttgaattaaaagaaaaaggtatgtttgtaattaaaaagaaagataataacacatatgaatgtagtttttataatccgacatccacaaattccacttcaaataaagaatcaaaaatttcagttacaggttacactataactaatcaaagtgtctcaaattttaaagaatctgacatacactttgaattaactaaataagcaataaaacctcggcactataacatttttatagtgtcgaggttttataaatattgcaaaattttatatcatagttaaggtcatctattgatttatatattttggtttcaccacagtatgaacaattatttattggacgtattttgctctttctttatttcagaaactgacttaggatttttaataagttttctacccaattcatctgtataagaaatatcggtatcaaattgaaaatcatcaatagatcttataccagctgtaaatgataactttttatcattatttatataaccactaatagaataaccatccattgagttttctttaaaattagtgaagcttatatttttataacctttcacattgtgcttcatataaatcgttattctttctttttgcttatcataatatttcttttcgtcatattttatcttcaagaagattccgactagaatcaatattataattataaatacaatcataagaaattttttattcaaaaaatcaatctccttttcattggatttattgacgaacattttaaattaatgaagcatactgagtttaacgatgattgtaaaatcgtagcaacccaaatgactgttggttttaacattagtaaatttttatttcttataatcttaaatcatgatttgatttactttaaaatttaaataattatatttttatccattctattcataacatttattcaattggacctgaaaagaaaaataacggtggctcggcttcatattcacttttatccaagtgttctttttttataatatctgtagattttaattcatttttatggtctttttctttaaataatttaccaaatgtcttatcatcgtatcctatgctatcttcaaattgatgattgtcagttgcagagatgagaactttaaaatcataatttttgttgtgattaacatatccatccacaatatagccacccataggcgtctttttaaaactagtaactttcattgaatgataattattaaggttatatttaaaatataaatctattctcttttcttgtatttcaatgtaatggtcttttttgtttttattgattaaatagccagtacttattaagagtgctataattaaggaaattataaatattattttttttctttccatttttttcatcctcactaaatttaatgttaaagaggtaatcttatgaaatatacagacaaaatctatcataaagtatctgacttttcttattcaaagttaaaaaaagataacacttataaaattctaggccaagattacaaagtcatcgaaaaacgcgacgacacccaaaatggattgagagcatatgttttcgctccagtaatcaaaggaaaagttgataccagtcaacttttaataggttatgctggcactgacccatttagtcttaatgatattcgtactgatttacaacttcccattcatcataacacaaataatctaaaaattaataatcattataaaaattaaaaaaactcaactattcacaaaaaatacaatacaataaaagataaaaatgacctttttagtttttcttctgtgttatatactaaaccccttatcggtgatcgaacacctgctaaatttgcaccgtctcaaatggacgaaagtgatgcttttactgaatcagtaaaaaagaaatatccagatagtgagatacacccaataggacatagtttaggtgcatttttagctcaatataatttaataaaacataatctagataacggtacaacgtttgcagcacctaacttataccattcatttactggcgactttaaaaaagaaattgataatggtgtctatgattcaaaaatacgcaatattggccattttgatgatcctattgtcaatagcggtttaaaaatgctgttttatggcggtttgaaaatgtcgttttttagcggtttaagattgtcgtatatttaatgatttttcggttttataatcttttaatcgatatgattctccagtaattttaaatacttttgaatggtgaactaaccgatcaattatagctgctgatacaatcttattactaaatgactctccccaacttgaaaatggaatattagtcgtaattattgttgatttccattcataccttagtgacattaactggtagaataaatcagcttgttctttggtgatgggagtataaccaatttcatcaatgataagtaactctattctgcttaattgttttaatgttttattaatgattcctttggaatctgagacagttaataagtctattaattctttgaaagtatagaatctagtctttatattttgcttacatgcctctattcctaatgagattgctaggtgcgttttaccaacaccactattacctaagaaacaaatatttatactatcttctaaaaaatgcatagattttaaagtgagtatttcttgttgatttatactaggttgaaacatgaaatcaaaatcatgtaaatactttattttagggaaacgtgctgaattcacagcacgtttaaattttaattctgattggtattctatttctttttccgttaaatcaatcaatatttcagttaaagatttctcatttttagaaagtaattcaatatagtttggataataatctttgaattttttagttttaatatttcaaagttattgagtaatttttgatggttcgtattcatcgaaagtcctcctaaatttcgtcatacagtaataatgaattttctatatacgtaagaatttctttgtcatccttatgtttaaatacatctgattttaatatttcactcatatcttcaacgatataattaaattttctttcggatagattatgccgtcttattaattcaccatcataataaatcagcaattcatcagtagaattgttgaatatcacttgtacttcttcaccaatgtatttagtaggtaccgagtatttaccttttctaaagttaatcatcgattctttagaaacgattcttatacactcattttcgatgtaagtatctagtaacttggcattaaaaaaatttaaatgttctttttcttcataattgaaaacgtcgataggtcgttgttctgttgcttgtgaaatttctaagtgattcaattcgtgacataaatcgtctactagctcaataagttctacagcatcataaaattcataatcatagggtcttaagcgctgttcaacaaatttagctaatgattcaacagacccttttgtttgagggcgatagggtctacaagcaataggttcaaagttggcatccttactaaattgataaaataaattattaaaaacgacttttttatattgtgttctcgatcgatcaactacagttctcatattatcgaaccagatttcttttggaaccccttcggtgtattcaaaagcgtcttttaaacattcaaataaggtatcttgttttctatcccaagttaatgtgatatacttcatttttgaatagtgtagaacgtaaagaaagatgttgaattgataagttctgccaaacttatcatgcattaccatatcttctttccagtctacttgagcagctataccgggattagtttctacgcgtatagttgcttttttagtctcattttgttttttatttttacagtattctcgtagaatagtatatttaccttcataaccctttttctctatatatttaaaaatggccatagctgtacatcctaattcaatttttttattaataatttctttaaatggatctagttttgatgctttcttattttgttgtctcttcttcaatcgttctaattcattttcttttcctgcttcataatattttttaactgttcttggatcacaattatattgtcgaccaagctcagcataatttggtttaatacctttcataatgtaaaatagcactccttcataaatgtcatgtctcaatcaaataacctccaatcgaagattgagttaagacatgattatataatttaaaaaagaaaaaatgtaggaaaaacagcattttcatttcgccattttcctacattttataaccgccatttacaatttgcttcatctaaaaatttaaatgttatgatttagccgaattaaaaacatatatatatatttactatgaacaaaaagttcatcctaaaaataaaaaaccatgatttcgaagtcttaataaactgaagcttctactctcatggcaatttatactatgatattcaattataatgcctagtctcatagtaaacggctactacattcgcatgtacttcgttatactgtccacgcatggtcgttgacttatttatattataatataaatattttatttttcaatacttaattttaaaaatcccttatgaaaatgttgatgagctgcatctttaaatcttattatacattgtataaaattatattgcgagatgctaaattgataatatacactttttgttgtatatgcatctcacctatctttttttgcttttttcaaataagaaagtattaaaaattaatgcctatacaacgttaaaggaggaacagtcatggctaaacttgacttaaatagtcttgacgacgagcacgtaaaattattaataaatgaattaaaatatccaaaaactcatatcgatgtaaatgaataaaaaacaatagttgctagtcgaacaaataaaaagcagataattttttattttcacgttttattttagaacaaaaaagaacaaggtcaacgagtcagaaaatctttttcttgatacgtatatgacaatagctattatatattgatgaacatttcatgctatttccattaaaatagtgtagaatgaatgataaatttatactaatatttataactatttaatatatagaattctatattgcgctattcttttgtttattttataattaattgaatgtattgtctgaacttaattggacaatactatgatttcagaacttgtttaatttttgaaatatagatttacttataactaaagtgcagtaaaaataattactcagttatagaaagttatagtgtttaatctcactcagatataaacaattctattatagatagatatgtagtgtgagaaacagacacagagagtataatcgtttctataaatctgaaggagattaaagagcacaagaaagtagagatcaagcattaagagagaagggtctagaaccagaaagatatgaataaaatccttgttaccggttctcacattgtagttcattattatattaattctagtgatgatagatttaatagcaatgatatgctcgtattgcgtaaaggtcgcaaatatacagttgaatgtgtaaaacgctctgaaacaaaatgacatataaacacatagattattcaagtgaatttaaaatctaatacttacgattaaaattctattgatgaaatcaaagtgataggtaaagttatttatagctatcatatctataattaatcgcgcctatatggtgatttaatataatataaacataggagaaatgaaaatgaagagattattaggtttattattagctagtacgttagtgctagtcgcatgcggaaatgatgagaataaggaagaatctaaaaaagaagttaaatcaaaagaaaagaaaattgagaaggaaaaggaaaataaatcgaaaaaagacaaggaaaaagaagttgcaacacaacaacaaccagataatcaaaccgttgaacaaccccaatcacaagagcaatcggttcaacaaccgcaacaacagttaccacaaaatagtgttcctcagcaaaatgcccaagttcaacaaaacaaaaagcaaaaagttgatttaaataatatgcctcccactgatttttctacagagggtatgtctgagcaggctcaaaaacaaattgaagagcttacaatgcaaaaagactatcatggtctgtcacaaagagaatacaatgatagagtttctgaaattataaataatgataattaattccacagggtagccctcctacccttattttttgacaaatttcagtaataataagtttatcagtagatttgataaagataaacgttattatgactttgaccataaaagtaaacgttataaaaggaacttttttaactaaacgcgaagcaacttaagtaaaatttatagtacacactaaattaatcaaaagtttttttattgttgataagacatcataaatcggcggattctaatattaagttacacacctaaagaatttcataataatgatcattgatttgcacttttttaaaatattaaattcaacttagatttcaacaaaataactaataaagcttatatatatcgacatattatacctaccagtccatccagaaataatttataacctatcatgttagtaatagtatatgatatatatcttccaaagagcgcaaactgtagcagaacatgagaaccttgcgattttgaaatggtctaatatatcaaatatcattgaaactttaatcacataaattaatagtagtcccctgttcgcagttctatatattacaaatgcaataaaggctaaagtaaactaattactttagcctttattaataatttagtcgaatttattaaaaattgactaactcctggttatgctacgcttttctttaaaatccgcacgtagatgccgattgattatattataacttttttatcttaatttttcaatatataatattcgattttctttaaggaacacctatacattacatatcaaaacgattaggtcatgcagatatacatacaacgcttaaaacatattcgcatttgattaaagaatttgaagaaaatgaaacttaatttatagaaaaaaatcttaatgatttcttttgtgactaaacttcaaaatcttgtgactaaaattaagattaatcatcaaaaattagtcacatagtggctaaaaaattttaaatggatataaataaataagaagtgtaaaaaatgaggataatagatcaaatgcagatatatcaagggtttgagtcgaaaataaaaatagcgcttaaaatgatttcaaaccattttaagcgctataacggaaggtaagggattcgaacccttgagacgcttgtgacgcctacacactttccaggcgtgctccttcggccagctcggacaaccttcctcaacaataaatatgtaataaaaaaacagaagcgatatttcacttctgtttgtatgactcctacgggactcgaacccgtgttaccgccgtgaaagggcggtgtcttaaccgcttgaccaaggagccatggctccacaggtaggactcgaacctacgaccgatcggttaacagccgatagctctaccactgagctactgtggaataatagaaaataatggagcgggtgatgggaatcgaacccacaacatcagcttggaaggctgaggttttgccattaaactacacccgctaatgtaaacgattatggggcggctgaaggggatcgaaccctcgaatgtcggaaccacaatccgatgtgttaaccacttcaccacaaccgccatgaattaagaatggttcaggacagagtcgaactgccgacacatggagcttcaatccattgctctaccaactgagctactgaaccgtaatggtaataataatggcggtctcgacgggaatcgaacccgcgatctcctgcgtgacaggcaggcgtgttaaccgctacactacgagacctattaaattaaaaactatatattgcgggaggcggatttgaaccaccgaccttcgggttatgagcccgacgagctaccgaactgctccatcccgcgctaatattattttgaattacctaattaatataccataatcaaaaacctaaagtcaagaactttttgaatttaatttaaatgttatctcttaaataattacttaaatatcgtagcaacatgttctctgttgaacacaaatattagtatattcatttttgtagtatacgtcaacgacatttttaaagttttttgtgtaaaaaaacgcttcttattcccttttatcatataagtgtctaatagttgtcataaatagtgttaaagcatttaaaaaggtataggaattataaagtttacaacgcctataccttctgaaaaagaaatttaaaagcttgctacaccgcatgttcattcagtcatcgactaccaatatgacattgtaacccctaagacattggttgatgcgctaatctcttcattttgttaaaaacataatttaccacaattttttcgaaatcagcagttacctactgacacaacataacacaacaatacattacctatcgtgtcatataatcttgcatccgatcttgcaacgctgtaaatgtttcgaagccatcctcttctaagaagtgccctccatcttccacgattcgcaagttcccctctaatgcattcattaaacgctgggtctctttatatgaaacgtatttgtcatttttagaactcaatccgtaaaaattgtcaactttctttttaatattatcgtaatcaatggttacattacttaaatcaatatctaaatctatattttccgcatcttctttaaagcccgctatactgaaaaaaccttcaatcggctgatcaatcatttcaatatattttaaagctgtgattgaacctaaaccatgtgttacaaaatatgtatcctttttgcgtacattaatttgtttcgtcatagcttcaatccactgatccactgtcttcgcttcaggggattcaaaattaaataatgttacgtcatatccttctaaagttaagttatgttccaaccactgataccaatgatttctactatttccatgcatagaatgtacaatgattacatctgtcatctcattctctcctttcaacttactacttcttttctatttaaaaaaatgaatgattacttataattgtaaaataaaaacaccttaattagaaatgttatatcgcaaagtgacatttctaattaaagtgcattgtcatcatttcaatatcattcaataatagctaaaccttcttcttcgattcagtttcatgaaataattcccgctgaaagtatcatgatttacacattacttccaccattatataacttaaaaatgactatatttcatcaaacattatctaaaggcatcgctcctacatcaacaccatccaacaattaacttacaactctgcgattacttcttcagcagcaactttaccttgtgtaatacaatcaggtagtccaaccgcttcaaaagatgcaccagttactctaagtcgtggatatgtttgtttaatatgtgcttgaatctgcctaatttgttgaatgtgaccaacatggtactgcggcatacttttcggcaaacgattgacaattgtaaattcaggatcgcctttaaatgtcatcatttgacttaaatctctacgtacaatcgatactaatttatcatctgtatgatcatcaaccacagtatcacctggtttacctacatacgcacgaatcaaaaccttaccttctggtgtagtaaatggccatttttttgatgtccaagtacatgcggtaatgtcagtatcactcgttctcgcaatcacgaagccagtaccatcataagtattttcaatgtctttttcatcaaatgccaatacaacagttgcaacagtcgtactatccatcgttttaaaataatcaaatgctggatcttgcccgaaccaattcaaaaagacttgatgcggtgttgtcactaataccccatcgaatacatcttcttgttgattactgtaaacaattttatattgcttttgagatgtaataatatcatccactgacgtattgtagcgtattgtcacacctttatttttcacatcttgttctaatgcttcaataaatgaacttaaaccatgcttaaattgtttgaattgtccttttggtgcgccaggatataattgtctttgtttcagacgcttatttttctcatccttcataccttttatcagacttccgaatgcctcttctttttctttaaaattaggaaaggtactcatcaaacttaatttatcaatatcggtaccataaataccacccattaaaggctcaattaaattctcaagtacctcattacctaatcttgctctgaaaaatgcaccaacagaaatgtcaccatcccgcatttgagtaggttttttaagtaaatctaaccctgctcttaactttccaagtggtgaaattaatttagttgtcacaaacggtttgatatctgtcggaattcccataattgatccacctggaataggatacaatttgtttttcgcaaaaatataagattgtccagtcttatttgtaacaatatcttgttctaatccaatatctttcgctaattctgtcatgatcgtttttctacctaaataagattcaggccctagttcaatcatataaccatctttacgatacgattgaatctttccccccggacgattcgatgcttcaaagatggttacatcaatattaggatcttgctgttttaaaaaatatgcacttgataaacctgttatccccgctcctataatagccactgatttagtcacaacgtttcacgcttctttcgtcattaaaatatagacttgatttcatcaacaattgcaccgataaataatggatgtgtattcggcatttttggacgataataattcgcaccaatatcatcgcaaacaactttacattcataatcattgtcataaagcacctctaaatgctcacatacaaaacctactggcgtatatataaagtttttatactgatgtttttcatataaatcacgtgttaaatcttgtacatctggccctaaccaaggtgtacctgtattaccttcagattgccaaccaatcgtgatatgttcaatattagattgttctttaattaaaagcgcagtatgttctagttcttgtggatatggatcattattcttttcgattagaccttttggcaaactatgtgccgaaacaactaataccgtgtctttatgttcctcttccggtatttgagctaatgtttcgttgactttattcgtccaatattcaataaatttaggttgtttataataatgtttcacatgtgtaagttgaataccatattttgcagcttcttcatcagcacgtttgtcatatgatcctactgaaaatgaagaataatgtggtgctagtactacagtgattgcttcagtaataccatctttgtgcatttgttcaaccgcatcttcgataaatggtgaaatgtgttttaatcctaagtatagtttaaattcaacatctgcatatgctttatttaatgctgaaactagcgcatcagcctggtcatctgttgtacctgctaatggtgataaaccacctataaattcatatctatctttcaaatcttgaagttcttcttcagatggacgtttaccatgtctaatatctgtataatatggctctatgtcactttctttataaggtgtgccataagccataactaataatcccatttttttagtcattgataataccttcctttaaatgaattatctttcatgtcttcaatgtaatactatgattatctttgtgtatatgtgtgtacaaattcacttactttacgtaacgtctctggttgcacttctgggaaaacaccgtgtcctaaattaaagatgtgtttaccgttctccataccttgatctaatattggtttcaatctctcttcaatgacattccatggtgctaataaaattgatggatctaaattcccttgtaatgttttagtaacgcctaattgttgagcctgattaatagacgttctccaatctaggcctaatacatcaatcggcaaatcattccattcattgattaaatgactggcacctacaccgaataaaattaccggcacatcatgtttttctttaacctcactgattaatcgaatcatatgtggtttaatgtaacgtctgtaatcctcgacatttaatgcacctacccatgaatcgaaaatttgaatcaattcggcacctgcttcgacttgagctgttacatatttaacagatacatcaactaaatgattcattaaagcaaaccatgttgcttcatctctatacatcatcgcttttgtaaaattgtaatttttcgatggtccgccttcaatcatatatgacgctaatgtaaatggtgccccagtaaatcctattagcggcacatttaacttttcttctgttaaaagtttaattgtatctaatacatatggtacatctcgttcggggtctatttgagaaagtttctcaacatcttgaattgttttgataggattatgaatcactggaccaatacccgatttgatttctacatcgacaccaattggctttaatggtgtcataatatctttgtataaaattgctgcatctgtatgataattatcaactggtaaatgtgtaacataagcgcacaactccggctgatgggtaatatcgaatagtgaatatttttctttcaattttcgatattctggttgcgaacggccagcttgtcgcataaaccaaacaggtgtatgtgtcgtttcttcacctttaatcattttcaaaattgtattgtttttattatgcaccataaaggcctcctaaattaaaatcattcttatctatattatcatatcgctcattcgttcgtattttcaataaataaatgtcataaaactgacattaaattacacatcatttgtttgtgcatttaaattttaaaatcttgatggattatctccacatctttttgtcttgcatgatttattatagtaactttaaccgtatattaatagtggtaatgactagtttatcgtcgtataataaataaaaacataagggggacctttcatatgaagaaattatatacatcttatggcacatatggatttttaaatcagataaaaatcaataatccatctcatcatttattccaattttcaactgctgattcatcggtgatttttgaagagactgaagaaaatactgtactgaaatcaccttcaatatatgaagttattaaagaaataggcgcattcaatgaagatcatttttattgcgcaatttttattccgtcaactgaagaccatgtttatcaacttgaaaagaaattaatcagtgttgatgacaatttcaaaaactttggtggctttaaaagttatcgattgttgagacctgttaaaggtacaacatacaaaatttactttggctttgctgatcgacaaacttatgaagactttaaaaattctgatgcttttaaagatcatttttcaaaagaagcattaagtcattactttggttcaagcggacaacattcaagttattttgaaagatatttatacccaataaaagaatagattcgaagaaaacttccattggttatgctgttaacgtatagttgctaatgtaatctgaacgccgtatcatttggcgttcaacattacatgcacctttacaacatacatgccaatggaagttttttaatctcgtaataatgtttcctgatattttaactttttaataatacttctaatcgttaataaacctacaatatagaaaatgagtacaacatagaataacgtcatatgttttataataaatgtcactgcaaacacggtacaaataacaaacattaatctatataaaaactgttcataccctttgattaccttctcttcaggtacgggccatacttgaggccacaagccatatgcttgctgtgaataaaattgtgccatttgtaacaatataatatatacaaataaacacccaataattgctgtcactaatggatatgataaccaaaccataagtaaaactgcaataattactaacctaaagataatattaaatgcgtctctccctcttataaagcttctaataaataagaataaatacatcgcattagagttaaatttattaccctttggaactggtaaaagtatatctagataacttcttctgactgcagattctttcaaatgtttcacatcggtaaacatattaacaaatttataataattcatatgatgtcgatgttcgatttcaatcattttctcccaaggatacaaaaagccaggtttatattttttaactaaaaattctattagcacaggcaaagcaaccatcacaagcgcaatgtaccattttggagctaatagtaagtaatatgttagagcaaagatgatgaatgatattaaattaacttgccatgttttaagtcccgattgataccattgccatcttaagcgtaaaccaacatatggaaaaattaatgcactgactccaaaacaaatataaaatgtcacattatgttgattaatattgtaaaacaacgggaacatcacaataacaataatgagttggattaatatgcgcgcaaagtaactatataaaatcgcatggcgcataaattgagacatgtgtttttcaaatggtaataaaaagattttatccgcttcttttaggagtggtcgcattggaaaaatggatgtcaacgcaacaatcactgctgctattaatgcaaaattgatattcgttggaatatgttttaaccattcaccatatccaaaaataaatgcacccagcaaaataagtaaaaagaccatgaaatgaccattaaatataaacttattaaaataatttttctctttacgaagggcatgtaatcttttattaaataatgtggtcgcttggttacgcatgtacatctccaccttgcgtcacatgaatatatatatcgtctaatgtttgattatgtaagccagtttgttgtctcaatgcttctaaatctccaaatgcaacgacttcaccttcgtctagtatgataaaacgatcacaataacgttcagctgtcgctaaaatatgtgtactcattagaacggttctaccttcgtttttcttttcaaccattaaatctaacatggattgaattcctaatggatctagaccaaggaatggttcgtctataatatacaattcgggattaacgataaacgcacaaataatcatgactttttgtttcatccccttagaaaaatgactcggaaaaactttcaattcattttctaaacggaatgtctttaataatggcattgctcgattcatcgcttcatcacgatcaatatcatatgccattgctgtcatctcaatgtgttcctctaatgtgagttcttcataaataaccggtgattccggaatataagataactttcttctataagcctctatgtcatcattaatgttgatgtctgaaattgatagagatccttccataggtgtaagcaatcctagcatatgtttaatcgttgtactcttaccagcgccattaaggccaataagtccaacgatttcgcctttgtttaattcaaaatttatatctttaattacagggcgttttccatatccacctgtaagctgttctactttaactgtcataaggcacctccatgacttatattgtaccaaaaattataaaatgctcatattaaatacacatgtcctaatatcgaatttttagcgacaatgttataatgaatggtaatacaacttgaaaaggagtgtagtcatcatgtcagaaacaattttcggcaaaattttaactggagaaattcctagctttaaagtatatgaagacgattatgtctatgcctttttagatatatcacaagttactaaaggacatacgttattaattcctaaaaaagcttctgctaatatctttgaaactgatgaagaaacaatgaaacatatcggtgcagcattacctaaagtagcaaatgctattaagcgtgcatttaatcctgatggtttaaacattattcaaaataatggtgagtttgcagatcaatctgtatttcatattcatttccacttaattcctcgatatgaaaatgatattgatggatttggttataagtgggaaacacatgaagatattttagataacaatgcaaaacaacaaattgctgaacaaattcaagcacaattttaaatgtatgcttaatctaagctcgaacgggtataatatgattaatattataacaattgcgtttgaagtgataacatcaaggttagcaattttaaacaaaatgagttatcaagataacagatgttaaaagtgaggagaatataaatgaaagcatcacgcattctattcggtatcggtgttggcgtagcagctggttttgtagttgcactccaaggacgagacgacaaaagtgtcaagaacaacacgatcgatcgtactgcccctactggttcaaaatcagaactacaacgtgaatttgaaacaattaaacaaagttttaatgacattttaaactatggtgttcaaattaaaaacgaaagtgcggaatttggtagttcaattggtggtgaaattaagtcattacttggaaacttcaaatctgacatcaatcctaatattgaacgtttacagtcacacatcgaaaatttacaaaatcgtggcgaggatattggaaacgaaatttctaaatagcatgttacgttctcgatcacaactatttttaatagtaacaacatatttattttttaaaattaaatgccaaataaacgagatgacattagaaattagatatttcttgtcatctcttttttatggctcgaatgaacgtttgattaccaattacagtaagacgttgtttgtagtgattttcccttaaatcatatttatgaattgattgaaaatattgcttaggattcattgtgttatccttgcactttgattacgctttacttaaatcattatcgacaaacaacatacttatattttcattgagccgaaccttaaatacacattacatataccttacttgcacaaattattaatctggtgtttattataattacatatcactatatttttagcatttgtatgacttagttagttaaaagatgcttttgcatatgctctgccatatccattttttatattattcaagttttcaaatactcatgtcacacgcgcctttttcataagtgatgctttattagcaagaatatgtgttcgcagaaatttattctgcattctacttctacgctagtcaatcagacaattttaccaatcccactttcgcgtttcaaatcaaacaatacgtcgcccctttcttcatatataacaattcttctaacatgatatgttactattgaattactgaacctgagttagttataatctaacttatattgaaaagagatgaggcgtaagatatgtttttatgtaaaagacaaattgatatcaatgcacgatttggtttgcctagaattgcatttatgagtgcagttgcaaccatcattatgtttttagttagttatgaagtaatgtattttttatctaatacgccattatcagatagacattttctcatctttttattacttgtatttatgacgtatccattacataaaagtatacatttattatttttcttaccatatagaaaatcgtttaaagttcataagttgactaaaagaaaatggcttatattctataatacctacgtcaatcaacctgtacacaaattttatttttgcattaacttaatattgccgttaattatcttatctgcaatgttcgtttatctaacaatttcattcccgcaatatggacattattttatgttcttattggcattgaatttcggtatttctattacagatttattatatttaaaaataattatattttctaattatggacaatatatagaagaacatagtacaggtattaatattttgaaaaaaaattaaaaatccatatcatttataacaaaataattatagcaaggtgttattatttgtttttaggctatgtaatagcttacaatcaaatgtatatagaccttgtttttttattttcatcaatttctacccctaaacctaatgctctagtctgatgtcatgggttattgattggtgataatataaaactatgttatattcacgatgattaacttacaaaggagtttcaactatgaagatgataaacaaattaatcgttccggtaacagctagtgctttattattaggcgcttgtggcgctagtgccacagactctaaagaaaatacattaatttcttctaaagctggagatgtaacagttgcagatacaatgaaaaaaatcggtaaagatcaaattgcaaatgcatcatttactgaaatgttaaataaaattttagctgataaatataaaaataaagttaatgataagaagattgacgaacaaattgaaaaaatgcaaaagcaatacggcggtaaagataaatttgaaaaagcccttcaacagcaaggtttaacagccgataaatataaagaaaatttacgtactgctgcttatcataaagaattactatcagataaaattaaaatctctgattctgaaattaaagaagacagcaagaaagcttcacacattttaattaaagttaaatctaagaaaagcgacaaagaaggcttagatgataaagaagcgaaacaaaaagctgaagaaattcaaaaagaagtttcaaaagatccaagtaaatttggtgaaatcgctaaaaaagaatcaatggatactggttcagctaaaaaagatggcgaattaggttatgttcttaaaggacaaactgataaagattttgaaaaagcactatttaagcttaaagatggtgaagtatcagacgttgttaaatcaagttttggatatcatattattaaagctgataaaccaacagactttaacagtgaaaaacaaagcctgaaagaaaaattagtcgatcagaaagtacaaaaaaatccaaaattattaactgatgcatacaaagatctattaaaagaatacgatgttgactttaaagatcgtgatattaaatcagttgtcgaagataaaatcttaaaccctgaaaaacttaaacaaggtggcgcacaaggcggacaatccggcatgagccaataacacaaaaccgagcgaccgtggtttaaaaatcataccacggccgctcggttttttcgcattaaaaatcggacagatgagctcatgtttcagtatactcatctgtccgatatcttttaattcttaatcgagtgattcaggattgtagaatctacgattttcaagaccaaatattttatctgtaaactgacccttgtcagtttttttataagccttttcaaacatattcattctagcatcgatattatcgatatagcataaaatttctgcttcttttaagtatggcagttttggcgaaccatactctaacttaccatgatgagataaaatcatatgtcttaacaacatgatttcttctccttcaatattcaattcacgagctgcttcaactacttcatcactcgcaatcgagatgtgtcctaataagttaccttcgactgtatacgacgtcgcaacaggaccactcaattctctaactttaccaatatcatgcaaaataatgccactatataacaaacttttgtttaacaatggataaatgtcacaaattgattttgcaatacgtaacatcgttaatacatgataacttaagccactcgcaaagttatgatgatgagaactagcagctggatatgtgtaaaatcgttcttgatattttttcaataaatgacgtgtgatacgttgtaaattagcattttcaatatctagcaaataatgagaaatctcttcttgtatttctgccggtgataaaggtgcaccatctacaaattgttctgtttttaattgatcttcagttgtcgctagtctaatttggttgactttcatctgtttatttccgcgatagtttatgatgtcacctttaacatgtacaatttcttcaggcttgattgttgccatatcattttttgtagccgtccaaaatttcgcttcaatttcaccacttttatcttgcaaatgtaatgtcatataatctttaccttgtgctgttacaccctgtgtagctttatgcactaagaaaaagtgatcaactgaatctccgggatttagattctctatatttctcatcgtttcccgccttcctctattttgtttaatgtaatcacttcttttgatggaacaatattatcttttacacatgtaaagtatagtacttgatagtgttctgataatgatcgtaaataattcaacattttttcagtacgttttttatcaaaatgaacaaatgcatcatcaacaattaatgggaacggataatatggtcgtagtaccttaattaaactgatacgtaaagctacataaagtaattcttttgtagattgacttagttcaacaggatcatataattgaccattaacatgtttaaccgtaattgaatcttcattatagttaatcatcgtatatctgccatctgttaaatgcttcaatatttctaccgcttcattaataacttgaggcaaacgtttatctttaatttgtttaatgtgttcatcaactaaactttgtaaataacttaaacttgcccaatcttttgcgatatcattaagttgatttttaagactgtgatattcatgtcttaaattagcaagcgttgtatcagtttccatgtgattgatttgtgcacttaaatcactgacttgtgcttgcatttcaagatattgctcattatattcgtcaacttgagtagccaataaatgatcttcttcttcaagttgtgctgttgttttttcacttaaactagaacttaattcataagaatagttttggttctcaagatatttagttaaatcattaaaacgactcaaattactagtgtatgtttggtaatcttcatgatgttggtaaaaatcttcttcagtaccaacattgataaaatcgaatagtgctgtaatttctttattattttcttctaattgagcatttaaatgatttaattcatttgtaacaagtttggtattttcagcattaatacgccatttttcattcgtgtcttcagctgatttcaaccattgttgcacatcgtggaataaagataatttgttgaaataaacaaattgtgattttgttacagcttcagcatgattgtagaatgtatctaattcttgaaccaattgctggcgttgttgatttaaatcactgatatgttgatctaatgctttaatattcgccattgtagaaatactatcaacaattaaatcatttgaaattttagatgataagtataattcatccttaacgttttcaactgtcgattgtaattcatcatgacgccctttcgcatcatttaaacgaccttcaatatactgacgtttctcttctaaaatatctttatttttcaaagcttgttgccagtgatctcgaatacgatattgctcatcaagatcaaaatctaagtcatagttttcatctaaaatggctagttgtgctttaatttcttcgatttcatctgtgatggcctcgctataatctacttcttttgatttagacatgatgataccgataacaaatactaaagttaatactgcgaaaataataccaaacaacatgttgtttgaaataaatgagaaggcagttaaaccaatacctactaatgttaaaagaataaacgttgttcgtaacaatttttgacgtttttgtttttcttgttgctcaatttcgaaacgttctttcaacttgctatacaagttctctttttcgtttaattcaatgacttgttgtgagtattcttttttcttttcaaaagtctcttcaggaactattttttcttcaacagaatctagttcgctatgaaccgcattatcttcgattttattttcttctaaactacgttctaattgtttaatgtatgcagcttgttcttgtttattcttgatttgctcactgacataacttttcattgcctcagaactatctacgtcatgatgcgtttcagaccaaccaatatttgcttgcaattcatctttatcacgttgtttattcgcaatatccttttcgattgcagtaagttcaaattctttatttttaatttcattttcttgttgattcaaactaatgaaggcgtcaatatcagattgtttaactggctctaattgagttgcttcttctttaagttgagctaaacgctcatttcttaaaccaatatctctttctaacgattgcttatgcgctcgtgctttttcgtaacgatctacacctttttctgggaatgtgattggctcaatatttaactgttgttctagagacttccattcttgtgaatgatcatgtaaagcaacctctttttgtttttcttcatgcatttttgataattgatttaaattatgctttaaattctctaatcgacgtgatgatttatctcgatcatctactaagcgatgatatgtttctagtttagcttcttcttcacgaatttgactttctagttgttttaattgctcaatttgttgattaatgattggatttttacctgattttttatataattcatcttttttacgattaatcacttcgcgcattgacgtgaattcagttgatcctaaagcccctgcttgtaataaataatcttgcaattgtttttcatttagatttctatgaatgtcttgaagccctagtacatcaaatgagaagataccttgatatgtctttttagaaatataattaagtttcttttgtaaccaagcatcatcacgcacagcaccattaggtaaatatactttcacatcaccttgagcactgcctttaattcgttcaacttcaatctctaagccatcatcaagaataagtactaatttaccaccatattggttacctagacgtggttctagccttggctctttagactttttagttggaaaaccaaataatatcgaatggatgaatgcttgaatcgtcgatttacccgcttcattttcaccaaaaatttcagtgaagtttttattaaattcaattttacgttgaacaaattgaccgtaaccataaatttcaagtgatttaattatcattttgttcacctctcatttctgcttttaatatttcttcagcacgattaactaatgctgtatggtcgaatgttccataatcgtctaggaacttagatgcccttggatttaaatataagtctgacatcgctttatcaaaaacagtttgatcgactaataattccgctgaaaattcattaactaaaggtgactcatcattttgtgcatattgtatttttaactcatcaatatatacaaattgattttcgttttcttcataatctgtaatcatttcttcaacttgtaataaatcttgaggtgaaattaatgtctcactattaataacaagcgttaaacgataaaaggcttttccttcttctctcacttgttctttaaagttttgaatgacctcgtataaaccttgcttagatgtcttatccgtttcaatagttgcttcttcaaatctaatatactgtgtaggataaaatttagtttttaattttaagtggtcaccctcgattaataagcaacctttttcaccttgctcattaaaatgtctaccttgaatattacctgaatagttaattacaggcatatcacttaattgttgacgttcatgtatatgacctaaagcccaataatgatacaatttactgtttaaatcttctaaaatgaactcggtatatctttcgttaacagaagatttactgtacgtaccatgcaagacaccaatatgtatgcctttttggccttgacttgacggatattcatcaatcttgttctcataacttgctctattttcataactaaatccgtgaatataaattgtttcaccagatttagtaattgcttcatacgtctcaactttatttgaaaatacagaaacattatctggccagtttgatgaaatctttgatgataatgggtcgtgattaccatgacaaacataaataaagatttgttcattttgtaaacgttcaaattgctgttttaagaaaatttcagcacgtaatgttctgttttcactatcaaacaaatcacccgcgataattacaaaatcaacatcttgttgtaatgcaatatctacaatgtttttaaagctttcataagcacttttttgaacatcctcaaaaattttagggcttatatgactcttagatttgaaaggactatctaaatgtaaatccgaacaatgaataaatttaaccatacatccatatctccttaattaaaggttctaacatcaattttgcaaaatccaactatacaaagcattctaatcactatattcatacttataggtgtagtgattcattagctgatttattaaaaccagtcgccatttttattttaatttcgttaaaaaattattatctacacaataataaagtgctttagtcaaatcgtgatgttttatttattaacaagtttattatttcttcattttaccataatacgcttcatatcgtcgatgaacatatgaaattgagacacatttataacagtttaaaattttatttgttgcgtacgttgatttttttcaaaaatttcagtcggaaatgcaatttccgtagttgttaacaccactagtgaaccaactgacacattaaatatttacataattactctactagatttgctcggcagtaatgaccaattagaaactaaatgtcaaaactatcattgcacttaatacgccaaacattttcaagccgttcttaatgagccattaaaagtgaaacacttttccatcagtccgatacatgaccgaactaatagtattacgttgaaaactttacactccaaaatgcaaaaagaagttaggacacgtttactagcctaacttccgatactgaacgcatctgcccaatttgacagagagtctctaacttccgttatcaagctcatctgcccgttttggcatagagccaatattgtttgattgcccagcttccgtcgtccgttctgagctaaagttaagacatgtttaatagcctaacttccgatactgaacgcatctgcccaatttgacagggggcctccaacttccgttatcaaaactaaaaaaactacccacaaagtctcggactctgtcggcagtttattcctctatttaaaggattgaaaaatattattttaatattagtcagcgtaaatttcgtctaatggtttaacgataatttggttgatttcttggaatacttgactcattttttgttcagcattcattaatgcagagatgttttcatctttttcaattgcttgcgcttgttcttgcgctttttgtaaatcttcttcagcaatttcttcaccttgcatttgtttttgttggaagttaatttgagtttcacggaactcgtcgaataactttttagattcttcgttagcttttacattagcgaatgcttctttgattgctttgtattcttcgctttctcttaaagcttgttctaattgatttgcataatcatataaatttactgccatggttatagcactcctttgttgtgatgtttattaaaacgttcgatattactttaccacatctcgcttttttagacaaagattgcaaccaaaccttggaaaaatccaataataccacctaaaatgaaacctaatgacataatcaactttagttctttgttagcaatttctataattaatttttcaatataatctaagtcaaacgtattaatttgttcttcaattaatcctcgtaaatccacttttttcataattgtagataagtgaatcgataattgttcaatgattaaatttgctaatttgctagagagttgactttctaaataatcaacaaattgaggcattaacgtaaccactggcttattcgcttgtttgcttgcatatgttgttacatacactgatagattttcagcgatttcattaaactgcgacgcatctaacagtccattcaatgatttatctttaaaagtttgatattcattggtaattaacgatgtcacaattgctcttgctttaggatgagatgttaaacgtataagttcttgttgaattcgatctgcaatactctcttttgtcataaacatttgcaacataccaattaacttacctttctcattgaaaaaagtatccaacatatcattaatatcttgtgtgccttttgcagatgataaataatttcttgcacgatcacataataagtctgttgcgttatctacatgctgatctaaaaatgttacaagttgatttggcaataaagatgctattgtttggttttgatgcttcgtataataattatttaattgtgatgcaatatattgatttccattagtttgtaatacttgttctaaatcaatatcgatttgagaagtaatttgttttattgacaattgatctttcgtcaacttttgtaactgctgttgaatcatagattctattgcttgttgtgattgcttgctttttaatttttcattaattaaagtttctgtaagcaaatgctcttcaatcacttggccaattttagttgcaatttcttcgcgtcttttcggtattaaacctggtgtaaatgggactctaaatttaaatatatagtatggtttaaaggggtgaaacagcattctaattgcaattacattagtaataccaccaattatcgcccctactacaatcataaatatgataataaatagtgcattcataattttgactcctttgtgacaacatagttattcattataccactatttttattttttaattcattaatcatttcactttctacccaatttattattagtttacatacaaaaagcgatgcctcacctctcgaaacaggtgtgttacatcgcttttattatttattaaaagtatataggcctagatatgtactaattcttctttagcatttctgttaaagtatgtttcagcttctctcattttagaagtaccgaaaattggttggttatctggatttaatacacgataaatattgcttactttgttactttgtaaaatgtacccattacgagtctcaatgttattccaataaatatcacttgttggtgcatggtttggatatgcacagtgatttcttgaaattgtttgaacgatttctaatggatcacagccaaatgtactgtttaatacttcagagtctctgaataatgcacaaattgaaatacaagttgtccagtttggtaatactctctctttttcgatttgtactaaagtctttttagaaagtccaattgtttgcgccatagtatcttgcgtataaccagcctctatacgaaccattttaaattttgtttgaattaaatctgtaaaactctgtctatccattctgttatctacctttctgtttggggaattttatccggacacaagaaattgcaataatacacatttcttgaaacacagattacatcttaatatatttttaataaaatgaaaagagtcaatttcacatttgtattaaattttgatcaagtcaacaaaagttaagtttacttcataatgaaacaaaagtaaacgaagttaaattttatgcattatgtctacatttgataaaacttacacttttattatgatatcaaatttacaaagaaaactgtataattaatgctatcgctgtgaaaaaaatctaaataaatcgattaaaaattgtcgattttttgacgaagctacatcaatgcaactttaaatcaacttattttccattgcataaattgctgcttgtgtacgatcgctaacttgtaatttactaaatatatgactgacatgtgttttaattgttttttcagatacaaataaagtttctgcaatctctttatttgttttacctttaaccatttcacgtaacacttcaatttctctctttgacaacttattcgtgtagtgtggtttttggctaactgtttcgaatacatcttgtgccttaggatgtatcattttttcaccgttcataactcgtctaatagtttcaattaattgctgaggctcaacgtctttcatttcataaccatcagcacctttattgattgctgaaattacatgttcatcatcaacataacttgttaataccaaaactttaatatgcggataatgtgccttaatatattccgtaatttcaataccattcatgccaggcattactaaatccaatagcacaatatcagggtgctcatgctcttttaaatattctaaaaatgtttctccatctgcaaagtcttgtaaaacttctatgttttcaatcgtggataataaaaatcgcaatccttgtcgcacaatataatggtcatctactaatattactttgttcatgggttatctccttaaatcaagctattttataggaattgtaaattgtatttgtgtaccctttgttggctgagaatgaaaggtcactttacctcttaataatttaactctttgttttatattatttataccgtgtgatgaagctatctgaacattatcgatctcaaatccttgaccataatcaatcacgtcaatatatagtatatcgttcatttgttttaatgtaagatccattttattcgtatcagcatgtttcttaacattattaatacactcttgtaatgctctgtatatgttttcttcaatttcattagataaatcgattaaaccttctacatttacatttaattgtatatgcattaatttactatatgctgtcaaagcatgaattaagccttgctcaagtccaactggcttaagttgccaaatcaatgcacgcatttcattaacggcattttgactcgtttcctcaatcgtcttgaatgcttgtttagcgatggattcgtttgacatgccatacgcagcatgtgctgtaagtttgacggaaaataacatttgatttactgaatcatgtaaatctctagctaaacgattacgttcattaatttttgccgcttctttttcacggtctgttaaataaatacgtttgatggctgaccctaattgaaatgcgacagactctagcaactctaaatcttcatcactatatatttcagtatttggtgacgctacatttaaaatgccgaattgttcttgacccgatttaagtggtaccgttgcatgatgtgtaatattgtcattttggctaggaaatgctttagaggctaagttaatacgagaacaattgacgatattcgacgctttcattagcctacgttgattaaatgctttcacacaccaacaagacccatctttaatatagtgacagtggtctgctgtcaaagattgtggtaaagccacatgtgatacaagttcatgttcacctacgctattgatgaaaaatatccagcctgtcgtgaaattactgccctcaattaaatattttaacgcaccttgggtcatgctatacatttcagtttcttcgtttaaaaattcggcaatctcttttaataaagctagtcgcgtcctttgttccatcaaatcgctccaattcatttttacgtgtattaactattatacattgagttattatatttttaaatcttagacgtgatcatgataaaatggccttgattacttaatagttatatttcggagaactgatttgtgatatgatattaaagactataggaggattttatgaaatttaaaataccagaaaactttaatgacttaagtttacgagatattttccaacaacttaaggtacctaaaaaagatttacatcatttaaatatgtctaaagatattactattaatgataaacctgcgcgattaatggataaagtgcatactggcgacgatgtatttgttccaaccatcgatgaaaaaagtaattatgttccaagttatcgttatgcacaaattaaatacgaagacgatgatatggcaatcgtaatgaaacctaaaggtgttaagacccaccctaatgatttaaaagaaagcaatactttaatgaatcatgtgatttacacggttgatagcgattatgtcgaaccaattcatcgactggaccaggaaacagtaggattattaattgttgctaaaaatcctttaatgaaaaaaattcttgatcgcatgttagaagacaatgatattacgcggatatacaaagcaaatgtcaaggcacttttacctttaaaaccacaaactattgatatgccaattggtaaagataaattccattcgaataaacgacgcgtgtctcctactggacagcgtgcaattacacacattttaacttcaaaaatgataaaagaaactgtgtgccaacttgaaatcaagttggatactggacgtactcatcaaattcgtgtgcatttagctgaaattggtcacccagttattggtgatcctttatacggtgattcaacgttaagacaattagaacttgaaagttacaaaatagagtttgtgcatcccttaactaaggaagtcatttccgtttctttggatgactaatttgattagttttgcatgatatttaaacatgcaataccgcattgtaactaaatcaagtatcaacttaaatcggatagatggaaaatttttaatttttcagatgttcggtttttttatgttttttacgacgcttaggattttatattttgaatgtatttggatttatagcacccttggataatgacttgtagtctttttcaactgcgttacgtgtatctatggacaatacataacatcataagattttttcacatattgtttggtcaatatatgtacaacaattcatcatataaaaaataggttctataataacatgggatccatgaaaggtttttcctttcatggatccatatcaaatcggacttataagttcaatttgacatagacaaaaaaataaagcttgaacactacatctacctgtaatgcccaaactttattttatattaatatttaattaatgaggatctaccatatcttctggtttaatccatgcttcaaattgttcttctgtaacatatccagtttgaattgcagattcttttaaagttaaaccttctttatgggctttcttagcaatttgagctgctttttcataaccaatatgtggatttaatgcagtaactaacattaatgattgatttaaataattatcaatattctcttcgattggttcaatgcccactgcacaattgttattaaatgtttccataccgtcagctaaaaggtaaattgattgtagtgtattatgcataataactggtttataaacattcaattcaaagttaccttgtgaacttgcgaagccaacaactgtatcattacccattacttggactgcaaccattgttaacatttcacattgtgtaggattaactttaccaggcataattgatgaacctggttcattttcagggatagaaatttctgccaaaccagctcgtggccctgaagccaaccatctcacatcattagcaattttcattaagtctcctgctagcgccttcaatgttccgtgtagttgtactacttcatcatgtgctgttaatgcatggaatttattttcagaagatacaaatggataacccgtattttcagaaatatactgtgccactttgtctccaaactcaggatgtgcattaatacctgtaccaacagctgtaccaccgatggcaagatttaaaatgtgtttcttagattcagataacattgtttcgcaacggtcaagcatataacgccagccactaatctcttgtcctagtttgatcggcgttgcatcttgtaaatgtgtacgaccaattttaataattgaatcaaatttatcttctttttctttcaaagtatttcttaaaagttttaatgcaggttctaattttgtttcaacctcttgatataatgcaacgtgcatagcagttgggaatgtatcattcgaactttgtgatttatttacatcatcatttgggtggatgctttcatcactttgatgatcttttaaatacatattagcaacataacttactacttcgttcacattcatattactttgtgtaccgcttcctgtttgccatacaactagtgggaagtgttcatctaattcacctgataaaatttgatcacatgcgtatacaatggcatctttctttgcctcgcttaattttcctaaatcaaaattagctaatgctgctgcacgctttagttgtgcaaaaccataaactacttcgattggcatacgctctttaccaactgggaaattacgtttacttctttctgtttgagcaccccaatatttatctgcaggtacttctatttctccaaaagtatcatgttcaattcttactgacattcaatttctccccttatcactgtttatttaactgtagtatatcattaaataatttaattgagcaatttatgattaaaacgttttcataatttgaaataaaaatacactaatcgcacgtgcccaccctttattacagtgatacggtcatacgattagtgtgttatctatcattatttagttaatgttgaactaagtttaattacgatactttgttttagtagcttcaaccgtagcaatagctgtaagtatatataatatagcactaacaattgtcgtatatggatttagagcaacaagcgtacctaatactcctgttaaactcgcataaaacccatcaagtgtataatacaatattcctgttattaataaacaacaaattacacttattacaatacctgattgattacttttaatgaatgtttgcgcattaacatcatcgattaatccttttgataaattgagttgtaattttattactttgaaaataataggtaaatataatgccccaattgccaatggaaaagctttaattgatattaaacttataataactgttgctatcaataattgaatccagtattttcctaacataaatatataaatctcctctaatttcattcttcaatagcatatcataatcttggcatattaagaaacgcggtttaatgatttcattaaaaatattaatgatagatgacttctttcgataatgtctggggtaattgattatcaattccgtttaaatggtgttttaaaatttaaaattgagtttttgatatattactatgtctgctacacaaatcaatgttttatgctttacaaagttatattggcagtagttgactgcgggcctcaaactcagaagctggcggaaagtcagcttacaataacgtgcaagttggcggggttccaacatagtgaaattggatcctcaatttctacagacaatgcaagttggcggaccacaaacacagaggctagcggaaagtcagcttctatgaatataataaaaaagctaggtaacaaaatgctacctaacttcatattcaagattatcaatcctatttgatataggttctatactattcattgtttacatgataaatagctgtatcttacacaattataatactttactgactgtcttcttcagaattcttttcttgatcattttgatcagaaatttgttccatttctttacctaattcttttaaatcttcaaaatcagttaccatactgttttcttcttcatgataatttaattttggatctttgtctttagacataatcaatacctcacagatttttaattaagcaaagcgtgacgtaaagtaagctttaacatcttcgggtaaacctgcagccgcttctttatcaagaataacatttaccattctatgtgcttttaaatcggctggttcaaagcttgttttaccattttcttgatataatttttcaactacatctcgtttattagcaccagtcactactaagaaaatttctcttgcttccattagtccttgacgaatactaacatttaacttaccttgttcatcgatagaaacaacttgtaatgttaatttccctttattttctttagttttaatcttatcagcgattaattcgattgcatctttttcataagcaattggataaacttgacctgctggtacacctaacgcttcgaaatatgattttttatcgtcataatctaaaatatttatttggctaaaatcaacagcatgtttttctacatttttctttaattcatctagtactggcgcttgatctgtatctaaatgaaaacctgcaattgtagtaggattattgttaaattgctttctaataatatcagcagcatattctgctacaagttgactattgtcaaagactttaaagttcattgccatgatttctacactcctcttagtttgcattttacataaaaacggcgatattaataattattataccctaactttcaatatatcaaaccatttaactttaacatgcttatactctaaatatagcacttaagcatcatttttataatgaaaatgagtaaattttaattcaatcctggaaaatcttgttgacgtaacgcttcataaattaacaacgcagcagtatttgataaatttaatgaacgaatatgttcactcataggaattcttaacgctgtgtcttgatatttctctttcacccagtctggtaatcctgtcgtttcttttccaaaaatgaagtaaaaatctttgtcatgatttgaaaaatcaaaatcactataagtctttttaccaaattttgttaataagtaatactcgccatttgtggcttcaaaaaatgcttcaatactatcatgatacgtaatattcacaaattcccaataatctaaaccggctctttttaacattttatcatcagttctaaatccaagaggtttaattaaatgtaaatgtgtgtttgtacctgcacacgtacgtgcaatgttaccagtattagctgggatttctggttgatataaaacgatatgatttgtcatattactattctctccttgtgtctaatccttttatcatttcattctgaacttctgcatcctcttgatcataatttgcattgataaaatctcttgcttcttccccaagaatttgaccaatagcccaataagcagttgctcgaatcatcggtctttcatctgttgttgcaacttttttcaattctggaattgcatccacttcattaaaatgtgccaatgctaaaatagcatttcgttgtatcggctttttaccacgccaagcacctgcaaggtgaccatatgtttgtttgaattctttattagacatacgtagtaaaggtactaatcttggctttaaaatttctggttccaaaatgatgtcatcttgttcggtattaatacctctatttttcgggcaaacttgttgacacgtatcgcaaccatataatctatttccaattttataacgatattggtcaggcatatagccttttgtttgcgttaaaaaactaatgcatttctgactatttaattggccatttccaactaatgcacttgttggacaacgatcaacacaaattgtacaatcaccacagctatctaataatggatcatcaggttcaaaaggtatactgactaacatttcaccgaggtatgtccatgttcctagtttaggattgatgacaaagccattacgaccaacaaagcctaaacctgcacgttctgctactgccctatctgataatacacccgtatctaccatagatttgatttcaacatctggaactttagattcaataaatgcagctaacatgtctaatcgtttacgcataattgtatgataatcttgaccccacgatgctctagcaaataagcctcttcgatcacctctaacactcttaggtgcacctttcagtttgttaggataaccaactgcaattgctatgattgaccttgctgttggtaaggataatttaggctccgttcgtaaagcaatatcagattcttcaaatcctgaggcataaccatttgcatgatatgcttctagcttttgcttcaattcatcaaaaggatcggcagtagtaaatccaatactgtcgataccaattgtatatgcatagtcaatgatatcttgctttaactgctttgtatccaatcgtatgccccccataaaataatactatgttattttaacacaaccattattcatattgaggtttcatttcacataattttaataataaaaagcttgaatatatgatataactttgtggtgcgcatcatatattcaagcttcgttaggttgttataatactcttgctaagaaattttgtgttctttcatgttgtggttgttcaaatatttcgactggtgtgcctgactctacgacaacgccatctgccataaatatgactttgtcacttacatctttggcaaatcccatttcatgtgtcacaaccaccatggtcataccttctttggctaggtctttcattacttttaatacatcaccaactacctcaggatctaatgctgaagttggttcatcgaataaaataacatctggatgcattgctaaagctcttgcaattgctaccctttgtttttgaccacctgataattgattcggatatacatctgctttttcttttaatcccactttatctaataacgacaatgcttccttatgtaattcatcgttattatctttctttaataatttaggagctaaaataatattatcgacaacttttttatgtggaaataggttgaagttttgaaataccatacccattttttggcgtagtttatctacttgtgtccttttttccgttaagtcattgccttcaaaaatcacttgacctttagtgggtacttctaataaattcatacatcttaacaatgtacttttaccactaccagatggacctattattgctactacttccccttgattgatttcaagattgatatcttttaaaacttcattatctccaaaaactttattaagattgtttattttaatcactggcattcaatctcccttcaatcatgttcataatgcgtgtaagtacaaatgttaagacaaagtataatgctgctgccactagtaatggtgtgaatgggtcaaatgaaataccttgaaccacttgtgcattaaacataatttcgccaactccaattgttgacacaatagatgattctttaattaaagtgacaaattcattacctaaagctggtaaaatgtttttaattgcttgtggcataattacacttttcatcgtttgtctataattcaaacctagactacgtgcggcttccatttggcctttatcaacagcatttatacctgcacgaataatttcagcaatgtaagctgaggaattaataactaatgcaattgttccacaaacaagagctgaaatgtctagtcctaatgcagccgttataccaaagaatacgataaatacttgaactaacattggagttcctcttaatatttcgatgtagatagaggcaatccatgaaataatttttattttacttaatttcattaacgcaacgaatgcacctaaaatagaacctaatgctacaccgataagtgaaattaatattgtaatcttaattcctttcaagaaaaaactaccatatttagaaataaaaccactgtcatcattcatcgcatttgcagcattagtcatatatttatcgattaatcctttatctttaacctctttaatcgttttattaatttgtgacaataattttggtgaatcttttggcactgctatcactgtatctttttcttcttcattaaatttcacattggaaattcctaatttaggattttgttttaaatatgcttctgctacaggtttttcaactacagcaccttcaacctttccacttttcagagctaatataacgtctggtaaacggcttaatgaagtaatagatgcattttcaatttcggtttgagcgattttttcttgttcagttcccttttgtgcccctacttttttattattaaagtctttgatatctttatattcattaactttatctttctttacaagcatgatatttttagtcatcatatatgaatctgaaaaatcaacttgcttcttacgttcaggcgttgaagtcattccggaaataataatatcaatttttccagttttaagagctcctaacaaactatcaaatgacatattgacgatttttaattttaaattattatctttcgcaatttttttagctaaatcaatatctacacctgcatactcagtcttaccattaactgtatgctcaaattccattggagcataatctgcagaaagacccactctaagttcaccgcgttctttaatcttctcccatgtttgatcttgttcagcatgtgctgtgggattgatatacaccatagcactgctaattaacaaccctaatactaatataaacctaattaaacacttcatttatacagccctccctaattaatattcataattatacatattaatacattttgatgcaatagtgttttataaatgtatttttatcaatataaagaaaagcttctttttaaaagactttatttaaaaaatcgcctaatacgtgaacaattcttccattttaaaatcaatcaaaaaaagcgctactatcaatatcttattgacagtaacgcctatatttatcatatattaaaacttattcttgtcatcaagctataaattattgttttggaacttcaaatttataaatatcattagaatatatagggatgaattttttacacaattcatgaacaataaacgccgatacaaatggtatgacaaaataaccaagagctaataaaataatattcattgttggatcacctgacattcggttaaatgcatttattgggccaactaatcctgtatatccaaatccagcagacaatggtgttcctttaacctgaagaacgtaagcaatgattccagtaattattccatttatagtcaatggtatcgaaataattaaatttttcaagtaaactgggatcatcatttttgcagctcctatgagtaaaactgcatttacaccaatagaattgacacgcaatgagccaaataagaaagtaacacacgcagccacaatacctaggtttgctgctccacttcctagtccgtttaaactaatcgcagttgcaatcgctactaacgatattggtgttaccattaataatgaaaatgccacactaataagtatagacattaacaacggatttaagtctgtaaaagaatgaattacatttccaattgcttgagtaatttttcgtatgtaaggtaatgtgattagaccgatacccccactaacgataggtactaaaactggtaaaataattaattcaaaagatccaagtttgttttgtaataccatatatataagacatgcaataataacaaccaaactcgtatttataatgtcacctataccttttaacataaaactattattgctatatacaacagcacctgaaccaatcatagctgatgtacctactatagcagcacctgcgccattaaatttaaattgatgagcagctaaaaccccaataataaatgccataaatgattgaattagtatcactaactgatacgttaattctaaaatttcattaccacttttaaatatttttaatacttcacctaataaagcattcggaacaagtgcaataacaacaccagcaccaatagaatttaaaatcttactgaaaaactgtttattatcagcattctttgcgttactcataaacgacctccaatttgaacattaaactcatcatattatagaaaattaactttaacaatgattagttggctaatttaatctaaatataacaatccacaaaaggaataaagtaaatttgaacaatctactcagtaaacaatgttatgttaattttaaaatactactaattacatcttgtgactaataatgtaataaattgtaaatattaaaatagccatattactattaagatagataaattgaatcgacttggtataaagcacaataaaatagcacttttacaaatattttattagaaaagttaaaacaaatacataccccagataatatagccattatcattaatgtaataccaaaaaaagaagttaaacaatgtatagttgcttaacttcctatattaaactcatcattacaatttgacatagagcctattaaagcgtgtgccatttgagtgccactttatttgtattgtttaaagagaaataaaaagaaaccttgttttacaaggtttctagtacgttatgttatgtaaataacagttaatataccggtggtcggggtcgaaccgacactccacaagtggaacgggattttgagtcccgcgcgtctgccaattccgccacaccggctaaatggtaaacaaaaaacttccctttggaagcaattatggagcggaagataggatttacacctatacctcgttccgggaaggaacgtgttctaaaagttgaactactcccgcaaatattaaattatggagcggaagataggatttgcacctatacctcgttccgggaaggaacgtgttctaaaagttgaactactcccgcataaacctggaggcggcaaccggatttgaaccggtgataaaggttttgcagacctctgccttaccacttggctatgccgccaataactgggctagctggattcgaaccaacgagtgacggagtcaaagtccgttgccttaccgcttggctatagcccattaataataagggcggctgaaggggatcgaaccctcgaatgtcggaaccacaatccgatgtgttaaccacttcaccacagccgccatggcaggggcagtaggaatcgaacccacaccaaaggttttggagacctctattctaccgttgaactatgcccctattaaaaataataaatggaggggggcagattcgaactgccgaacccgaaggagcggatttacagtccgccgcgtttagccacttcgctacccctccataaatggtgccggccagaggacttgaacccccaacctactgattacaagtcagttgctctaccaattgagctaggccggctaagaaatggttcaggacagagtcgaactgccgacacatggagcctcaatccattgctctaccaactgagctactgaaccataataaaaatgtaatgatggcggtctcgacgggaatcgaacccgcgatctcctgcgtgacaggcaggcgtgttaaccgctacactacgagacctataaaatattgcgggaggcggatttgaaccaccgaccttcgggttatgagcccgacgagctaccgaactgctccatcccgcgataataaaaaataatggcggaggaagagggattcgaacccccgcggcccgttaaggccctgtcggttttcaagaccgatcccttcagccggacttgggtattcctccattattataggtaaatcgctattaattataaaattaaatggcggtctcgacgggaatcgaacccgcgatctcctgcgtgacaggcaggcgtgttaaccgctacactacgagaccattagtaaaacggaggaagagggattcgaacccccgcgagccgttaagcccctgtcggttttcaagaccgatcccttcagccggacttgggtattcctccaaaattatatggaccttgcaggactcgaacctgcgaccgaacggttatgagccgttagctctaaccaactgagctaaaggtcctaaatataattttacaactaataaatagtggcggtggaggggatcgaacccccgacctcacgggtatgaaccgtacgctctagccagctgagctacaccgccttatatagtttgtaaataatatggtggagactagcgggatcgaaccgctgacctcctgcgtgcaaagcaggcgctctcccagctgagctaagcccccataataattacagtatatcgggaagacaggattcgaacctgcgaccccttggtcccaaaccaagtgctctaccaagctgagctacttcccgtataattaacgcgcccgataggagtcgaacccataacctcttgatccgtagtcaaacgctctatccaattgagctacgggcgcatatatttttattgaaaatggtgccgaggaccggaatcgaaccggtacggtgatcactcaccgcaggattttaagtcctgtgcgtctgccagttccgccaccccggcactataaaaatggagcagaagacgggattcgaacccgcgaccccaaccttggcaaggttgtattctaccgctgaactacttctgcatatgcgggtgaagggagtcgaacccccacgccgtaaggcgctagatcctaagtctagtgcgtctgccaattccgccacacccgcaaatggtgagccatagaggattcgaacctctgaccctctgattaaaagtcagatgctctaccaactgagctaatggctcttccatggtgccggccagaggacttgaacccccaacctactgattacaagtcagttgctctaccaattgagctaggccggcaatatgtaagaataaatggtggagaatgacgggttcgaaccgccgaccctctgcttgtaaggcagatgctctcccagctgagctaattctccgatttaaaactgcctggcaacgttctactctagcggaacgtaagttcgactaccatcgacgctaaggagcttaacttctgtgttcggcatgggaacaggtgtgacctccttgctatagtcaccagacatatgaatgtagattatacattcaaaactagatagtaagtaaaagtgattttgcttcgcaaaacatttaaatttgattaagtcttcgatcgattagtattcgtcagctccacatgtcaccatgcttccacctcgaacctattaacctcatcatctttgagggatcttataaccgaagttgggaaatctcatcttgaggggggcttcatgcttagatgctttcagcacttatcccgtccacacatagctacccagctatgccgttggcacgacaactggtacaccagaggtatgtccatcccggtcctctcgtactaaggacagctcctctcaaatttcctacgcccacgacggatagggaccgaactgtctcacgacgttctgaacccagctcgcgtaccgctttaatgggcgaacagcccaacccttgggaccgactacagccccaggatgcgatgagccgacatcgaggtgccaaacctccccgtcgatgtgaactcttgggggagataagcctgttatccccggggtagcttttatccgttgagcgatggcccttccatgcggaaccaccggatcactaagtccgtctttcgaccctgctcgacttgtaggtctcgcagtcaagctcccttatgcctttacactctatgaatgatttccaaccattctgagggaacctttgagcgcctccgttaccttttaggaggcgaccgccccagtcaaactgcccgcctgacactgtctcccaccacgataagtggtgcgggttagaaagccaacacagctagggtagtatcccaccagcgcctccacgtaagctagcgctcacgtttcaaaggctcctacctatcctgtacaagctgtgccgaatttcaatatcaggctacagtaaagctccacggggtctttccgtcctgtcgcgggtaacctgcatcttcacaggtactatgatttcaccgagtctctcgttgagacagtgcccaaatcgttacgcctttcgtgcgggtcggaacttacccgacaaggaatttcgctaccttaggaccgttatagttacggccgccgtttactggggcttcgattcgtagcttcgcagaagctaaccactcctcttaaccttccagcaccgggcaggcgtcagcccctatacatcaccttacggtttagcagagacctgtgtttttgataaacagtcgcttgggcctattcactgcggctcttctgggcgttaaccctaaagagcaccccttctcccgaagttacggggtcattttgccgagttccttaacgagagttcgctcgctcaccttagaattctcatcttgactacctgtgtcggtttgcggtacgggcacctattttctatctagaggcttttctcggcagtgtgaaatcaacgactcgaagacacaatgtcttctccccatcacagctcagccttaacgagtaccggatttgcctaatactcagccttactgcttagacgtgcaatccaatcgcacgcttcgcctatcctactgcgtccccccatcgattaaaacgattataggtggtacaggaatatcaacctgttatccatcgcctacgcctgtcggcctcagcttaggacccgactaacccagagcggacgagccttcctctggaaaccttagtcaatcggtggacgggattctcacccgtctttcgctactcacaccggcattctcacttctaagcgctccacatgtccttacgatcatgcttcaacgcccttagaacgctctcctaccattgtccaaaggacaatccacagcttcggtaatatgtttagccccggtacattttcggcgcagtgtcactcgactagtgagctattacgcactctttaaatgatggctgcttctaagccaacatcctagttgtctgggcaacgccacatccttttccacttaacatatattttgggaccttagctggtggtctgggctgtttccctttcgaacacggaccttatcacccatgttctgactcccaagttaaattaattggcattcggagtttgtctgaattcggtaacccgagaggggcccctcgtccaaacagtgctctacctccaataatcatcacttgaggctagccctaaagctatttcggagagaaccagctatctccaggttcgattggaatttctccgctaccctcagttcatccgctcacttttcaacgtaagtcggttcggtcctccattcagtgttacctgaacttcaacctgaccaagggtagatcacctggtttcgggtctacgaccaaatactaaacgccctattcagactcgctttcgctacggctccacatttactgcttaaccttgcatcaaatcgtaactcgccggttcattctacaaaaggcacgccatcacccattaacgggctctgactacttgtaagcacacggtttcaggttctatttcactccccttccggggtgcttttcacctttccctcacggtactggttcactatcggtcactagagagtatttagccttaggagatggtcctcccagattccgacggaatttcacgtgctccgtcgtactcaggatccactcaagagagacaacattttcgactacaggattattaccttctttgattcatctttccagatgattcgtctaatgtcgtcctttgtaactccgtatagagtgtcctacaaccccaacaagcaagcttgttggtttgggctcttcccgtttcgctcgccgctactaagggaatcgaattttctttctcttcctccgggtactaagatgtttcagttctccgggtgtgccttctgatatgctatgtattcacatatcgataacatgacataactcatgctgggtttccccattcggaaatctctggatcaaagcttacttacagctccccaaagcatatcgtcgttagtaacgtccttcatcggcttctagtgccaaggcatccaccgtgcgcccttaataacttaatctatgtttccaccatttttataagtcaaacgttaacatgaagttacgttcttttataaaaagatttaaacgcgttattaatcttgtgagtgttctttcgaacactagcgattatttcttatgaattcaagcttatttaaaactctttattcactcggttttgcttggtaaaatctatattttacttacttatctagttttcaatgtacaatttctttttagtcaagcgctcgcataagcaatatcgctttaaccaaaaaatatttgaatgttaaataaacattcaaaactgaatacaatatgtcacgttattccgcatcttctgaagaagatgttccgaatatatccttagaaaggaggtgatccagccgcaccttccgatacggctaccttgttacgacttcaccccaatcatttgtcccaccttcgacggctagctcctaaaaggttactccaccggcttcgggtgttacaaactctcgtggtgtgacgggcggtgtgtacaagacccgggaacgtattcaccgtagcatgctgatctacgattactagcgattccagcttcatgtagtcgagttgcagactacaatccgaactgagaacaactttatgggatttgcttgacctcgcggtttcgctgccctttgtattgtccattgtagcacgtgtgtagcccaaatcataaggggcatgatgatttgacgtcatccccaccttcctccggtttgtcaccggcagtcaacttagagtgcccaacttaatgatggcaactaagcttaagggttgcgctcgttgcgggacttaacccaacatctcacgacacgagctgacgacaaccatgcaccacctgtcactttgtcccccgaaggggaaggctctatctctagagttgtcaaaggatgtcaagatttggtaaggttcttcgcgttgcttcgaattaaaccacatgctccaccgcttgtgcgggtccccgtcaattcctttgagtttcaaccttgcggtcgtactccccaggcggagtgcttaatgcgttagctgcagcactaaggggcggaaaccccctaacacttagcactcatcgtttacggcgtggactaccagggtatctaatcctgtttgatccccacgctttcgcacatcagcgtcagttacagaccagaaagtcgccttcgccactggtgttcctccatatctctgcgcatttcaccgctacacatggaattccactttcctcttctgcactcaagttttccagtttccaatgaccctccacggttgagccgtgggctttcacatcagacttaaaaaaccgcctacgcgcgctttacgcccaataattccggataacgcttgccacctacgtattaccgcggctgctggcacgtagttagccgtggctttctgattaggtaccgtcaagatgtgcacagttacttacacatatgttcttccctaataacagagttttacgatccgaagaccttcatcactcacgcggcgttgctccgtcaggctttcgcccattgcggaagattccctactgctgcctcccgtaggagtctggaccgtgtctcagttccagtgtggccgatcaccctctcaggtcggctatgcatcgttgccttggtaagccgttaccttaccaactagctaatgcagcgcggatccatctataagtgacagcaagaccgtctttcacttttgaaccatgcggttcaaaatattatccggtattagctccggtttcccgaagttatcccagtcttataggtaggttatccacgtgttactcacccgtccgccgctaacatcagagaagcaagcttctcgtccgttcgctcgacttgcatgtattaggcacgccgccagcgttcatcctgagccaggatcaaactctccataaaaattatgatgtttgattagctcataaatactaaataatgtttgtaacttatagttacgtttttggaattaacgttgacatattgtcattcagttttcaatgttcgtttgtcacttacaagatttaattataactcgcaagtttttgtaagtcaagaattatttttaattattttatttctaaaaaataaatttcctaactcaattaattcaacaaatattattttattatgtatttgttcgaatttcaatagtcaaatttacactttattaatattttaaatcaacaacttaaaacatttgttttttaaatattagtgccgtttgacgacttttatataatatcaagttattctagtagagtcaacataaaacaacacttatttttgtttaaaaattactgttgaagggattattttctattcgtaagtactatatgtatttaaagtgtaattccttacgctttttacttcagttttacaaacaaacttctcttcactttatggatagttatttagtagaccttcgtttaaatatttttatgtttatttataaaggatactagttattagttaataccacttccgtagttagaatattcttttcttctatttaaatatttttcagaatgagcataaaaaagaagttaaacaactttcatgtcgtttaacttcttaaatattacgcttacttatatgaagtaagctaacgcctttttaatttgtcatactaccaaagttaaattatttatcttggcattctttacaaactccataaatttccattcgatgatgtgttacgtcaaagtcagtcatatgctgagctaatctttcaatttcatttaactgtggatattgaaaatcaacgatcttaccacattgttcacatataatatgataatgattatgtgtattaaagtcgaatcgacttgatgagtctccatatgttaattcttttacaattccaatatctttaaacactcttaagttattatatattgtcgcaacacttatatttggaaaatcaggtgaaagtgcttgataaatttcatcagctgttggatgagtatgtgaagaaattaaataacgtaatattgcttgtctttgaggtgtaattcttacgcctgcttgtcgcaatgatgcaattgattcttctagttcatgttcaattgattctatttcaacactcatctatatcaccatctttcttatataataattattattacttactataaatataactgtagtattgcgcgcgtgtcaatatttacatgatgatttcatttaatagccttttttagcatcaacttcattctcaattagaccattcttattgagaaaattaactagattgtttttaaaaatatctaataagtcatactttgcttcataatcattaccagttatatgcgctgttatagttacattatccaattcatataattcatgattaggtttcaaaggttcattttcaaacacatctaaatatgcatgtcgaataactctactttttaatacttctattaagagcgtttctttaactatgctacctcgtcctatatttataaaaagtgcttcatctttcattaattcaaaatgttttttctttagtaaatgaatcgtttcttgcgtttctggtaaagcatttataacaatgtcagcatttggtaatgtgctttcaagtgattcgatagtatatatctcatcaaactcatctttgttctgacctgacttgctcagaccaattaaattcatattaaaagcctttgctaacttcgcagttctagtagcaattgcacctgtacctaaaaataaaactgtttgtcctgataggcgtttaccagttattttcgaatcatatatatgttgtcgttggttatcatatgatagtttcatctttttataatcatctaaaatgaaagccaaaatgtattcagataattgtttagcttgaacaccttttccattagttaaaagtatgccgtgatctgcaatataatctaacggtaatgtatttacacccgttgcaaaccatgcgatccattttaaatttgtacaacgtcgtaaaaatgcctcattgataccgccatcataaccaactaatatatctaaattagccaagtcgctctcaggtatttctgatgcttttttataaaatttaaaatctacatctgaaaagcgttgttgtaattcagtttcaacttcacgcatacgattcaacccaacaactttcatgtatgtcaccccaaaatgtttttaagttcttctatttgtgttttaactttaaccttctcgataacatctaatactttaccttgttcatctattataaaagtcgttcttacaatacccatactttctttgccaaatgatttttttaactgatatacgccagtttctttagctaatttaaaatcttcatctactaataaatcgaaattcaatccgtgtttttcaataaaattttggtgttttttctttgaatcaccgcttataccatatactgcaacatctaaatcattgaacatttctaaattgtctctaaagtcacaagcttctgtggtacaagtaggtgtattatctctaggataaaaataaataatcgcctttttaccttttaatgtatcatttgtaatgacagttccgtcttgattttctaatttaaatattggaaattgttctcctttttgcaacatataatcacctttttcttcattataataattttatgatacgatattagatgaaaatattaaattaaaagaggttgatataaatgaattttagtgaaagtgaacgtttacaacaactttcaaacgaatatattctaggcggtgtcaattccccttctcgttcttataaagctgtaggcggcggtgcacctgttgttatgaaagaaggacacggtgcatatttatatgatgtcgatggcaataaatttattgattaccttcaagcatacggtccaattattacggggcatgcacatcctcatattactaaagcaattcaagaacaagctgctaaaggtgtattatttggtacaccgactgaactagaaattgaattcagcaaaaaattacgggatgcaattccatctcttgagaaaattcgctttgtaaattctggaacagaagcagtcatgacaacaattcgtgttgcacgtgcatatactaaaagaaataaaattataaaatttgctggatcttatcatggccattctgatttagtattggttgcagcaggtagtggcccatctcagctgggttctccagattcagctggtgttccagaaagcgtagcacgtgaagtcattactgttcctttcaacgatattaacgcatataaagaagcaattgaattttggggcgatgaaattgccgcagtattagtagaaccaattgttggtaactttggaatggtaatgcctcaacctggatttttggaagaggttaatgaaatttcacatagcaacgggacactagtgatttatgatgaagtaattactgcattccgtttccattacggtgccgctcaagatttattaggtgttatccctgatttaactgcatttggtaaaattgttggcggtggtttaccaattggaggctatggtggacgtcaagatattatggaacaagtagcacctctaggacctgcatatcaagctggtacaatggctggtaacccgttatctatgaaagcaggtattgcattactcgaagtactagaacaagacggtgtttatgaaaaattagacagcttaggtcaacaactagaagaaggtttacttaaattaatcgaaaaacataatatcacagctacaattaatcgtatttacggatctttaacattgtactttacagatgaaaaagtcactcattatgatcaagttgaacattctgacggcgaagcgttcggtaaatttttcaaattgatgttaaatcaaggtattaatttagcaccttctaaatttgaagcttggttcttaacaactgaacatacagaagaagatattaaacaaactttaaaagctgcagactatgcttttagtcaaatgaaataacttttaaggaagtatattttaaattgaattaaaataaaacaaatgctcacatagtagattcattttatatcgttaacaattaacgtttaaattgatatgtccctatgtgagtttttattttacaaatttatactcttttaatctctgactaaagttttacatcgctatcagtattatgtatgatttattttaacaactataaataagcttgaattttgtaactagtaagtgtataacagtaatgaatacgaatattagatattcaataaacttaaaaggggcgtcattatttttgagactaggagctcggatttttaaaactggtatagccattattttagctatgtctatcgcttctttactaccggatgatgttggtctgaaagccttagctggtgtcagtgctgttgttgcaatgcaacctagtatttatcgttcatttaaaacagtttctgatcaagcattaggcaacattataggtgccatactttctgttacaatggtaacaatttttagtgataattttatcattatgggtgttaccgtcgtagtacttattgctattttatttaaatttaatttagcacatgttgctactttggcgagtgtaacagcattaatcattatgggacaacataccggttctttctatattactgccttttacaggtttgtacttgtaatgattggtgtcataagttcttctctagttaactttgtgtttctaccacctaaatttgaaacaaaaatttactataattcattaaatatatcctcagatatttttatgtggtttaaattagtattaaatgatacgacggagtttaataatattaaacaagatagtcataatttaaaacaacgtgtcgaaaagttagagaaaatttatgattactatagcgaagaacgtcctattacaaaaaaacacattcaccaacagaatagaaagaaaatacttttcagagaagtagttcagacgactagacaagcttatgaagtattaaacaaattgtcgcgttatcaaaacgacttatatttacttaataacaatttcctattacaaatcaaattagatttagattcattaactgcttttcatgagcaaattttagctagcctttctaaaaaagcacgttataatgtgacacatgttgattatgagttagataatccgcagaaaaaagatttattgtctacatttcagcatgagttaataaatcacccttatcaaacggaatattcgtttgccaatgttatgcaaattgttgcagccatcgaagagtatcgacaccatttagagcatttagaccgcataagaattagctttttcacatatcatagatctgatgcagacattgaaattgttgaagaagactttgatttataacattaaaacaatttctgtaattaataccacattgagataaagtaatattgaatctcgaaattaaatttaaaaaagcagtaagattattttcaatgaagaaaatctcttactgctttttctatgttttgaccccaccatcctgttacaaatcttccctacaaaattgtactgaagtcaaacaactaatactttataaattttgaatgctatataaatgctcgtaagcaccttgttttgcaatcaattcatgatgcgtacctgtttcaacaatatgtccattttcaattacgacaattttgtcagcatgtgtaatagtggacaagcgatgggctacgataagtgtcgttcgatctttactcaacacatctaatgcttcttgaataatggattcactttctaaatcaagtgcacttgttgcttcatccaggataagaattggcggattatttaaaaatattctagcaatcgataacctttgtttttgaccacctgataatttaacacctcgttcacctacttcagtgtcatatccctgtggcaagttcatgataaagtcatgtgcattagccattttcgccgcttcaactacttcttcatctgttgctgttggacgaccaagtaaaatattttccttaactgtatcagagaataaaatattatcctgttgcaccaatcctatttgatttcttaaacttcccgttaaaaaatctttaatgttgtgaccatctattaaaatttgcccagaagttacatcataaaatctcggtattaagttaattaatgttgatttaccaccaccactcatacctacgaaagcaactgtttctcctttttcaatactcaaattaatatcttttaaaattggagcttcgttatcgttatattgaaaactaacatgatcaatatcaatacgaccttgtttaatttcaataggttgagcaccaacaccatttttaatgtcataatcttcgtcaattaattggaatacacgatccattgaagcaaaactttgcgttaaagttgtaaatgatgcgactaaacgacgtaaaggcccgaacaataactccaagtatccaacaaatgctgcaagtgtacctactgtgattgatccagaaatagcaagatatgcaccaacaccgatgacaataattggtccaatatctgtaactgtattaattgcggcaaaggaataggcattccatcttgtatgtttcaacgcacgtattaaaaaattagtgttctttttatcaaagtttttcgcttcattgtcttcaatcgcaaaacttttaacgactgaaataccttgaacacgttcatgcaagaatccttgaacctcagctaatgcttgagatctttcacgcgtcaattttcttaatcttccaaagaaaacgtacaccgttaaaatgtaaaatgggaagataaacagtgctgctaaagtcaatttcacatctaaaaagaacattatggatagtgcaataataattgttatacaatctaaccaaatattcattaaccctgttaaaatgaaatcttttgtttgttcaacatcattaattactctagatattacttgacctacttgattattagcataaaatctcgcacttaaagcttgtaaatggttgtataactttttacgtatatcatacaatattttattacttgtccattgcgccaaatattgacgtataaattcaactggtggtctcactattacaaaaataaataatgcgataccaatggcaatagttaaatgatgaactttttcatcagtcgttaatgcgtggttattaatcacgccatctattgcatatttaattaaaagtggtataagcattggtataccaaacttaattatcccaacaataatcgttgcaaaaatacgatatttgtatggcttaacaaattgcaaatatcgtttaatcatacaatcccccctaatctattgccctatcctattcataagcataaaaatgaatagaggttggatacataatttgtagatgtaaattcttcttacaatttacatttttaaaattaagatatctcaacctctgtcatattcatgtgattaaatacgttgtcttattcgtatgttatattctattcaatttaatctatggatactgtgtccccacacgacagcaaaagttatcatacttctttacatcactaagtcaatataaatgatttaatcagtatttacactttatttgcttaatactgtctaatttttttgtaacgttctttccaaactttgataaaatctggcgcgaatgggcccttcttctgttctatccattgttgaagaatgtccacgttgcgtcttaaaataatatcaatatcatgcggataattcatttgattcatatgttgctcatattcatcttcatctaataaatgatactttccgtttggatatactttaatatctaaatcatagtctatatattttaatgcctcttcatcacaaacaaatggtgatgacaaattgcaatagtaataaattccatcttctctaaacatgcagataacattaaaccaatattctgagtgaaagtaaacaattgccggttcacgtgttatccaagttcttccgtcactttcagtcactaacgtatgatcattgccaccaatgacaacatgatcagtaccctttaatattgttgtttcagaccaaacgcgatgaatcttaccatcatgtttataactctgaattttaatgttttccccttctttaggtatggattctctgaccatactccacaccaccttctgttaatttaaccattataaattatagcatatttcagaaatagtattatataaatacatatttttacgaaataagattttactacttaatgattaaactcggtaatattgctaagtactacaacagagatttacatgtcccatttaaagtatataaaatcgtcacttttataaatcaacactttaactttttgacattgttatcctatgagatttaaagatatcatttatacatttttaaaattaatgtcactatgttttccgataatattaccaatcatcgaatgttacccatttataaattgataaatctttgacataggtacagggaatgtatattgatctcgatcacttaaatcaaaccaaatcatgtcatctggtaatctttcaatgttaattgttcctgaaacggcgtatacctttatcttccatgttaaatgagtaaattgatgcttcaattcaaaaataggtgtttctactggttgaatgtcatgaccgattttttcagtcatttcacgtctagcatgctcactttcaaacataggaaattgccacataccatgcaataatttttcgctacgcttttgcaacagatattgaccttgattatttctaattaaaaagacggattgctcaattacttttttacttacatttttagatttaactggtaacttttcaaatgtacctttatcaaatgcctcacagttttcttgaactggacaaaataggcataatggatttttcggtgtacaaattaatgcccctaattccatcatagcttgattaaatgttccagcttctgtagtaacatacggtaataattcttgttcgtacgatttcctcgtcgattgtaatttaatatctcgatagtcatcattcaatctagaccatactcgaaaaacatttccgtctacagttgctagtggtacattatatgcaatgctcattactgcagcttgtgtgtatgggccaacaccttttaaagctttaaattgatcaggatctttgggaactaagccttcatatttatcatgaacttccttaattgccgtatgaaaatttcgagctctactataatatcctaagccttcccagtactttaacacttcatcttccgaagcttgactcaaaacttccacagttggaaatcgttcaacaaaacgatgataatagtcaataactgttttaacttgtgtctgttgtaacatgacttcacttaaccaaatatagtacggattggtcgtttgtcgccatggcatttctctttgattttcatcaaaccagtgtatcaaattttctttaaaactagactgctgatacatttataaaaccctttcctcaccaaaattaattgtctttactcataatgtttttattgtacattaaaatcatggttagtatgtaagttaatttagttatttgcgaaattggattataatagtatatataatattatgaaatgagtgaactgatatggacactgcaacacatatcgcaattggggtgggccttacagcacttgcaactcaagatccagcaatggcttctacgtttggtgcaacagctacaacccttatcgttggttcattaattcctgatggggatactgttcttaaattaaaggacaatgcaacatatatttcgcatcatagaggtatcacgcattccatccctttcacaatactatggccaattttaattacatttttaatattcacgttctttagtggaaccaacccatttcatgtatggatgtgggctcagctcgcagtatttttacatgtctttgtagatatattcaattcttatggtacacaagcacttagacctatcacaaacaaatggattcaattaagtgtgattaacacatttgaccctattattttcacagttctttgtattggtattgtattatgggttgtaggcttgcatccatttgcagtcttctttcctataatcgctttactaatcatttattacatgattcgttttaaaatgagagccgtaattaagcaacaagctctaaaagcaattcaacaagagcatcaccctgttaaagtatttgttgcgccaacaataaaatttatggaatggcgtgtcgcgatacaaactgatgcacatgactatgttggaaaagcatatggtaggaatgtggtgtttagtgataaagtggaacgtcaaaaattatcaacagattccattttatggaaagtcaaaggtaataaagatatacgtacttttttaaacttttcttcaatctatcgctggcaaacaacaacgttagcagatggttctactgaaattcgtttgattgatttgcgttatttaaaaaatgatcattattcatttgtggcaattgcacatgtaacaaacgataatgtcatagaccactcttatattggctgggtatttacagaagataagttacaacgtaaactgtatgctaaataatttcaagttattattcactaaagttaatctataaaaaatgaacaaccgggcagaatgaaaatcaaaacgatttttactctgtccggttttttaatgtaaaactatgaacgcttttacaaaacctaatatttatattgtcgctaacaaactacctttaatgactcgaaatatcaaaatcagtataggaaaacaatatctagattatattctaattgtttctgattctcacagattaatttacacaacaggtcagctaaacatcatgaagaagtatccgcctcgtctgtactatcttttgaaacatcctgttgtttatcagtttgtgtcactttagatgttttattataaattgcgtgtgtcgtataccttgctaatacgaaatttactgcagctattaaacataagaataaaataaagtaaaaatgatatggaatgttttccatacttgatataccaaatatgatagattgtgctataccattaacaatgtaatacattggattcagcattaggatgtgattgataaatacatgatttggatttggtatgaaaataattggtaacacaaagaaacacaatacacaaatcccataaaatatgatatttattttttcagttaacagtcgaataagaccaaaagtaactgatattaatcctacaaaaatagttgccattacaataaaatagaatagcgctatatatgatgtttcgaagtttactggtttaaccaatgcactaaccatcgtcaaaatgactagcataataaaacttaaaatagacataataactactggcgtcgctgcggaaatattaaataacttagtaactaaaaagtcattcatataatgatgataagagatataaattgtgaacatcaataccgcaaaaacaatcaatgcaataagtctaaataaccatcgcacctctttaacatcggtcaaatgactaaaggaaaatagcgtttcacttgcaataataagtattaaacatgcagctaatacgattagaaaacttttccaactttgttttaaacgttctgttacataccttttagtatgcggtaagtttttaaaatataaaataatattatctagcatctttacacctacaattcaatataaatccatttgtcttcttttaaattggcaatacaatatccattcccaactttagtaatccaaatgttattgttaatattaaacttatcttttaattcttttttatctacgattggataaacaaaaccgtataactgattattatcattgaaaagtaattgtatcggttgttgtgtaacggatgcaacgaaacggttatcatcatcaggaactaaagttttaataactgaactatgctttttatgtaattgactgttaaagtatgcatagtaattactataatttgatttcatatatggcgctaattttttaaaactatgcgtttgatataaacctgccgggttaaaatattctaatttatctttactaacatagtaagtcttattatcagcggtaacacgataatttttactattttcgccagtaattgtaactacactatattttggaattgtgacttgtttatccccttgcatatccacactgccattaaaagcaattccataagctaacttttcgccatatggatctttattttcattttgcatcgtagcacgattcgtaaaatctgttatcgaaataattcctatattattgaaaatgagcaacatcatcaatgctaagcctaaaatagtacctgaggctaaagtccaaaaacgcactaaaaacttaggcggttttgcatgattatagcgctcaacgcgtttaaaattataggtcatctccggtattcttgtacgattctttttccaatctaaatcaaagttttcaatttcttcttttgagtttaaacttaatcgatcacgttcatgttctttaaaagatggaataacttgtttaagtgacccttccattcttaattgaccatgtgaaaaccaagctatgtagttactcacttgtgaaattttatcaatatcatcaccaattgacacaatcgttaaattattttcaatataatcatttgttaattcaatcgcacgttccataaattgtggtgttaaatagtcaataacatgatttaaaataataatatttgattttgatgagcgtgcaatacttaatagtaattgagcgtatgccgctttcgaaatatggttaaccggcttcgttttataatcgcctaaatgtgcatattgaataatctgttcagctttatgatcattaatttcatatggaaatagttgaactaactgcgctgtataagcttcaacagtttgatgaattaacgattgatcttcaatatatccgtagaacaaatcttcagtacaaactactttacctttatcgggtttaattgcacctgccaacaattgacctaccatcgctttggaagattcaggttcaccaattatacctaatgcttcaccttgataaatatgtaaactaatattgtttaaatcgatatcttgagcatcatatccaaaaggtaaataccattttttattctgtttattcctatagtagtgtgttacttttagtaactttaaaacaattgaacttcccatctattttcatccttctataattgtaataacgctataggtaagccttcttcgggttcatcgctattaaatctaaacccccacgcaaaaataccttttaatctttctactttaaaatattgattactgccatcagtcagtttataaattttaccaatttcaatcttttttctgtctactaagtaactttcggcaacaattactttactttgataaacgtcatattcatttaaaataccattcatctcagcttttctcattttctctttataaagttgtatttcgtgtcttaattctggctcagacatctcactcaatttcttctgttccatcggcaataccactttcttctaatttagctttaattttatcatatttatatccttttctcataaggccttcgatagtttttgaaattaatttttgttgcgtgtacttctttcgatttttattataaattttttctaaatctcgttgtaataaatcgtctaaaaccgcttcatcttgtgtaaaatccatttcattcaatacagcatgaatggtttccatttcaaaccctttttgaattaaagattgcattactttttctttaaccttattttgtggccctttttttgttttagatattttttcagcaatttggataatatcatcaagttcctgttgttctctataaagttctgtaaacatttcaatgatatttggttctataccaagttgatatagtttttgttgataaattttaggtcctttatctgtcgtgcgaatcattgtattttttaaactttccgcataatcttgatggtcgattaacttttcgcgataacaatattcaatcacttcagaaatcgcttgttctgatatctcttctttttgtaaatattgtataacttctttatcagttctctttttatatgataaatattggattgctttatttaaacctatgcgataatgatcatacttttgaatctctgccatgtcagcagcttcaagttgttgccctttttttaaattaaatttgactaatgtatcgatatctatacccatttcaaattgttcgtctaaaaaaagattaaaacgttctttgtttttcttttgaacttctattttagtaatcttcggcattggatcaccccgttactttctcaagttttaatacaatactcttttattattcaataagccacttcctatagcaaatgtttaactttaaatatttttcgatgctaacaaaaaatcacactatcatcttttaaaatgaaagtgtgattacaagcaaatctgtaaaatttattaagcagaaacaattcaactttatcattatgacatttcaattaaaccttctacattattgttccaagtatcttacacataaatgcaagtatttaacgatttaattgtgacatagcctgttgatattgtgtttcattgatataattttgttgcttcattttttctaagttcgtgcttacacgttgcgtaaaattctcagacatattattgatattatatacgctaggtgcattgactttactagctaaaatagcactttgtaaaactgtaatgtgagacattgttgtactatttttattcacggttgttccaaagtaatggtttgctgcgccctcaagcgtatattgattatccccaaagtaaatattatttaaataaaagcttaaaatttcgttcttattatattgtttttcaactcgatgagctacaaataattcttttacttttctagtaaatgaacgatcattatcataaaaataatttttgacaacttgttgtgtaatggtactaccaccttgcacatctctgtcgctaatcgttgaaaataaagctctagttgtacctttcaaatcgaatccatgatgattgtagaatcgttcatcttccattgaaataaaggcacctttaacatactctggcatgttatcagctgacacaaaactacttttattttcaatttttcttagttcatccacattatcgcgtgtagataaaaaatacatgataccaataaacaatgcgataatgattagaatggttaataatattttcaatagtattcgtttgctttttttctttttcggcggtttgccaactggttgataatacgtattatagtgaggttcgtgtttcatatgctcaaaatgttcatttgagtttgagtacctatcgcttcttttcatgcgtttgctccttcttttaaaactcacttagtatataccttgagtttaccagtactatcacaaataggctacactttttgggaaaatcagtccaagggcttacaatcgtatacgccatcatacttacttttttgttttttgaaaagattatagataaatcattgtgattttaaatattaatcatgtcaaatattgttatattttataaaaataaaagaccatccctactaaatgccaatagagatgaccttttatttgttattcattttttaaaactgaaatctatatttcatttcaaatgaaaatatataaattttaacaatcgataaccacaatacttctattgtaattgtttaacaatttctcgattaaaatcatctaaatcgtctggtacacgacttgttacaatattgttgtccacaactactgactcatcaactacatgtgcgcctgcatttgataaatctttgcgtacatttaatactgctgttaacgtacgaccttttaaatcgtctgtatctattagtatttgtggcccatgacaaatggcaaatgttggtacatcatttttagtaaagtatttagcaaatgtgccatatcgaccttctgtatctccacgtaaatgatctggtgaaaatcctccaggaattaataatgcatcataatcttctggtttagcttctgcaatgcctacatcgacagtaactttttcaccgtgtttaccaacaacttcactatttgcagtatctccaatcactacagtattaaagccagcattctctaatgcctctttaggacttgaatattctatatcttcaaattcgtttgctagaataattgctacttttttagtcattgaaaatcacctttctatatatcattgatacaaatactatagacaagtaaatcaatgattaaacatacaagatataaaaatattaagcgactgtcgcgatatctaactctaacacatcttatgtggcatttacttagatactaatttaaccttttcttcgagctgatctaacaatccaatccattcatctatatcttcaacacgtacttcatcaggatttacatgatcgatatcctcaataaacttatttaaacgcgcttttatctgttcgattgtttgctgttcattcataaaaagttaactccttttattttgttttctttttcattattatcctaacagaaattgcgttaaagcgatataatcttagctatatttatgacattcaaattattttgacttttaaaaatccccttttcaattaactaaaattaagagataatttgttacgagtgataatacgaagtggtatcataccgatatgaaccaaatagaaagaaggaagtttaagacgatgaatagcgtcaaattgaagcaacctgttagcattcacaatgatccatgggaagcatataacgatgttaaagaacatggccaattaactttaagtaacatcgaatttacaactacaaatctttgtaatatgcgttgtagccactgtgcagttggttatactttacaaactgtcgaccccgagcctttagatatggacttaatttatcgtagacttgatgaaattccaaatctgcgaacgatgtcaattacaggtggcgaaccaatgttttctaaaaagtctattagaaatgttgttaaacctctattaaagtatgcacataatagaggtatatatatacaaatgaattcaaacctaacattgcctcaagatcgttatttagatattgctgaatatatcgatgttatgcatatctcacataactggggaacaactgatgaattcgcaaatgttggctttggcgcaatgaagaagcaaccaccgttaaaagctaagttaaaattatatgaacaaatgatttctaatgcacgtacattatcagaacaaggaatgtttgtatctgcggaaacaatgctcaatcaaagtacgctaccacatttacgaaaaatacatcaagaagtcgttcatgatatgaaatgtagcagacatgagattcaccctatgtatccagctgactttgcaagtcaattaaatgtgttaactctagcggaaatgaaaaagacaattcatgatatattggatttcagagatgaagatatttggatgttatttggtactttgcctgtgtttccatgcttaaaagatgatgaagatcaaaagttactatcacgtttaagaactgctaaaaatgtaacaactagaaatgacccggatggccgtagtcgtttaaatgtcaatgtatttacaggtaatgtaatcgtaactgatttcggagatgaaacaggtacaatttcgaatatacaaaaagataaattaacagatgtatttgataaatggttatcctctgatcttgctaaatcattaaattgtcattgttccgagtttagttgtttaggaccaaatgttcttgttaaaaatatgtactatccgaatatggattttaaagataatgagcgtcatatgcacaaacaacaacaaattatacaattttaaaaacgcttaattatgcggagaagcactttatcgataagtagtctccgcatattttaatgctattacaaaataaaaacaattaattgctggcagcactctacataaataataaaggtcatttaatagaactaatagtagtctataataaaagggtaaaatttacctaaaaacataaatgtgcataatcaaaaagacagattgtatgtggaatattcgaacataacagttcaattcatacttaacaatctgtctttatatttttagtctctaatatgttgcacttgagctaaatattcaattgtttgtttactttcaatgcgacgtgcttttcttcgttcaacacgttgtggtgctgtatcataaaaccatttttcaacatcatcttctggatatactccaggtacatgtttaggcttcccttcatcatctaacgcaacaaatgttaagtaacttaatgcagctaaatcatgcttgttattaaatacatcgtcaattctaatttgaacgaccacttccatcgaacttgtcccagcgtatgaaaccatcgctacgtattgtaatatgtcccctgttttaatcggctttaagaaatctactgagtctgtagatgcggtaactacttgcgcaccagcatgtttcatagctgtgattgctgcaatttcatcaatattagccatcaatgtaccaccaaacattgtatgatggtgattcgtatcttgagggaaaacttgtctatttttataacattttgattctgacatagatttcattggtctgtcctgatttgtcattattttatctcccaatctatactttaatcacgtatttgacctttaaatacatgtttcatttcctactcagcacctcaaaataacatttattaaaatgttgatgcccaatttccattttcaaatactagttcttttgaaccatcttcgaatatgccataaatagtcaaatcactactaccaatcatgaagtcgacatgtacgtttgaatcatttaatccgcttgcaatcttttcctcaacattcatttccgttccaccttgaatattaaaggcataagcagatccaatcgctaaatgacatgctgcattttcatcaaataaagtattgtaaaaaatggtattacgatttgatatcggtgaatcatcaggtactaacgctacttcacctaatcttcttgaaccttcatcggtattgattaaatctttcaataccgcttcacctttttcagctgaaaaatcaataatttctccatctttaaacatcaatttaaattgatcgataatcgtgccattataacttaaaggtaatttattagtaacatatccatctactctatttcgatctggtgctgtaaatacttcttcagttggtatattagcaataaaagcttgttccttgccgttaacataacttgtagcatcttcccagatatgatttttcgctaaacctactgttaaatcagtaccttcagatacataatgcaacgcatggtaatttttttgctgtaacttttgagcgtaaacacttaaattagcgatgtgttgacgccaattttcaactggatcattaccatctattcgaacaatatcaaatacctcgtcaataaacttaatatatgcttcttctacagatagttcaggatatactctcttcgcccaagctttagatggaaaagcagctacgacccatggaaattgatttttttgtacgctttccatatatcctttaaatgcgcgtgcgttttgttgttgaaaggcttgtaatttttggctatcgataccatccattaaatcaggatcttcactaataagtgctaaattagcagcgccacgtttaacgtaatccattctcgcttcaacatcatatgattttatctcatgattagcaaaatgttccacagattcattttcaaattttaagcgttttaaggttggatcgctatatacaacacgtacatctgaagcgccacaatgatatgcttcttctacaattaaatgcgttaattctaatgtttctactgatgatctaataaatactggctgttttggttgaacattcataccaaccttaactaatagttcagcgtattgttgtaacttttctttgtaattagtcaaaattcccactcctagtcgtgtcgcaattgtcctaaagcgtcagcaatagctgtcacttcacttggcgacaatctttctcttgattgaacaaaatcatatatatctgttaattcttcttcatttgcatttttatatttttcaggatctaataatccttgattaacaatatttaacttctctctaatagctaatactttctcttcatttgtcatagccacaatgttcacctctaataatagttatgttatcaaagtatcacaatttaataaactttaatagatttttatataatctgctttcttattgtttaaagtcgctataaaatggggatataactacatagtttggaggaatcaaaatggtagatgtagcatttgtctgtcttggcaatatatgtcgttctccaatggcagaagcaatcatgcgacaaagacttaaagacagaaatattcatgatataaaagtacattcaagaggtactggtagctggaatttaggagagccgcctcatgaaggtacacaaaaaattctcaacaaacacaatattccatttgatggcatgattagtgaattattcgaagcgacagatgattttgattacattgtggctatggatcaaagtaacgttgataatattaaatctatcaatcctaatcttaagggacaattgttcaaactgttagaatttagtaatatggaagagagtgatgtaccagatccatactacacaaataattttgaaggtgtatacgacatggtattatcatcttgtgataatttaatagactacatcgtaaaagatgcaaatttgaaagaggggtagttttttatggaaaataaatttgttcctggtattttaattggtgccgtaattggtggtgcaattagtttagctgataaatctacacgtcaagctttagttcaatcagttaaagatgcaaaaaatggtaaccgcactcgtaagccttctaaagtcagcaagattaaagacgaagttttatactggaaagatgttgttgaagaaattcgtcgtaataatcctgaattagaacgttcattaaaggatgcgaaagaaacatttgttaatagaaaaaatcaacgctaagatgattttgtttttataaggtaatacttaacaatttggtgtacacctttcgtagttatcattattaaatgataatacaatgattggccaaactgcattgtttcagtattgcctttgttttaattttaaatcaaaatagcctatgaaagatttaaatcaattaatttctataatattatcatttttaaagcatatcattgtttagtttttttataattggataaatactaatagttactttataaaacattacatagagaaaggttaaggagtgcacatgtcgaaaaaggaccactcttcttcaaaataccttaattctgttaaggaagcgcaagaggagtcaaaaaagaaaaataaaagtaatcccaaaattgatgttgatcgtacatatattgaacctcaacaattccaatctaagaaacctaaaaaagatgatcaggttttcttcttatcaagattgaataaacctgcaaaatataagaaagactctaatttcttatcatatctcatctatcgcataggaaaagatgatgcctcaggactagcagcgcaaatgacttaccatttcgtacttgcaatgttccctatgttgcttttcctattaacattattaccatttttcaatattaagcagagtcaaattactaatatgttaagtaatgcacccgctgaaacctctactctaattaagagtgtaattggtgatataactcaaaactccagtggtggcttattatctatcggtttgattttggcaatttggtcagcttcaaatggaatgactgcaattatgaattctttcaatgttgcttacgatgtagaagatagccgtaatggaatcgtattaaaactactaagtgttgtcttcactgtagttatgggcgttgtgtttgtagttgctctagcattaccaacgcttggttctgtaattagtcatttcctattcggtccacttggatttgacgaacaagtgaaatggatttttaatcttattagaattgtgttaccaatcattattatatttatcgtatttatcgtgttatattcggttgcacctaacgttaaaacgaaacttaagtcagtattaccaggtgcagtatttacttcaattatttggttagctggttcatttggttttggttggtatatttcaaattttggtaactattctaaaacatatggcagtatcgcgggtatcatcattttgttactatggttatatatcacaagttttattataattgtcggtgctgaaatcaatgcaatcattcatcagcgtagtgtaattaaaggtaaaacacctgaagaagcagcattagaacatgatgacaataataaaaatcattataatgagaacactaggtacgaatatgatgaagatactaatgcaacacatcaacgtacgtatcatgttgacgaacatcctagtgatacctatccagaagatgataaaaatataaaagacaaaatcgttgataagcttaaaaaagactaaataacaacaaaacagaggttttcgctaatgattgctaagacctctgttttttagtgtatatttgatgttatattgtgatcggcgtaagtaacttttcttaattcgaaatgaactattgaattaaattatgttggaatgcatagataacagcttgtgttctatcttgcacttctaacttacttaaaatgttactcacatgtgtcttaaccgttttaatagtaatatgcgatgcactagcaatttcttgatttgagtaacctttcgcaatcaataataatatttccatttctcgttctgtaagcatttcatataactctgcgcgctttttcatacggttacgcattttcactaaaacttccggttcaaaaacagattctcctctagaagttttacgaactgcatcggcgatatcttttgcactagttgtttttaaaatgtaactatcgacacctgcatctaatgcacgatatacctctttatcttcaataaaactagttaacattaatactttaatttgcggtaaatcttttttaatctgagtcgtcgcttctactccatccatgtcttccataagtaaatccattaatattaaatctggcttcaactcatgggctttggcaattgcttctttaccagaagcgccttcaccaactacttcaatatcactttgcgttgatagataacttgaaattcctatacgtaccatttcatgatcatccacaaataatactttaatcgtcatacgaatcctccttatttaaaggtgctttcacctcgatacgtgtacctgaatctggcaatgatacaatatggaacgttgcaccaatttccaaagctctttcacgcatatttttaagtccataactttgttctaatttttcatcaacattaaaacctttaccattgtcttgaattctcaacaataaataatcgtctttattaaacaattctactgtcacttttgtaccgtttgaatgacgcaatgtattcgaaattgcttcctgtgtaattctgaacaaatgatcttcaatacctttaggcactttaaaatcttgtatttcatgcacaactttcattggcacttttttttgtaaatcaataactaaatctttaataccctcacctaaagatttgtcttttaaaccaagcggtcttaaatgtaacagcaaagcacgcatttctagctgcgaatcttgaaccattttctctaaaatcggaatttgttggtctaatggtggttctaatttcgtttctttgatagcagatagcatcatacttgccgcaaaaagttgctgactaacagaatcgtgaagttctcgtgctagtctttgacgttcatcttcaataatctttttaactttcacatcattaatattataattttcattggttaagttttgagttttaagtcgcaatttatgcaattcttgatttaaaggtacgagtgtatggtataaatctaacgtttcactatatatttctatattttgatcattaatgccaactgtttcgccttccattgaacgctcaatttgcgtcttaatccaatcattttgctgattgattttgtaagcgagaaccgaaccaacaataatacacaataatatgatgatgagatttaaaaataaaaagactggtattccgaatatttgtgtataaaacataccttgaaaatagatgatatttacaaaaactttatcgatgaacagaaatgcagctagcatgctatatactaagatgagcattgaaccaattgttctaatgtagtggttcatcgataaatcacctctacgtctccgataaacgttgatacgtagatattaactgtatagttatccggtttcatcatttcttcaatatgaatattgttattttcaactttatatgatttttcattcacgtaagtacttccataaaaagcagctacatgtaaattaatattgtaattaaccggcaatataacctgcactttacctaaaatgtgtctaacaacaatggtattattttccttaatatttgcagcttttgttaagtcaatatgtaggtcgccaattccatgttgaatttggacatcttcccacttatatacataaactggtgttcgttgctcaccaaaccacttttgtttaataaaagatggtgaagtcataacctcatccgtcgcaactactttttttggtttaaatttgtgtattaaataacgcacaataagtagtaataaaaagacgaacaagatgatgattgtatacttattagacaataatgtgaatgcaattaatagcgcgcctatccaaaacgccaaaaggccacgtattttatgaaaataaagatatcctacataaactaatacacatcccaataatagaacgagtaaaaagccaattttttcaaaaaatatgtagtaaaaattggcaataatcattaatgcagtaaaaatgatcaacatttgcgttgatatatatttgtgtgtcatgtttcgccgcctttctatgccacagcgttcatataatttattagatacgatgttttttctgttgctattttttcagttgaagtttgttgaatttgagtttcaatttgtgcataatatgcttcaactttattcaactctgatttaatattttcaatttcttgattattgatttctcttgcacattgaatttgaaatgattcagcaatatcaatatatttattttctaatgttagcattagactgtcaattaacttgctaagttgttcttttttagtaattaaataacgcatataatcatctaaatttttcattttttcatctaacattaaaaggtagtgcttgatattatttcttactgttgctctcaaaaactgttcaatataacgttcaacatagttcataactatcaccttttataataagttttaaagtaccaaatgcgctatgtatcttcgttgatgtcgatgatatgtttgcttataaactactttattacaacatatttttgaaatgacgcattgattgtgttcttaattattataaaacagttccgaaaccaatatgaataggctccggaactaaatgatgttcatactttagtcttagtatatgttgaactattcttcttcaatctttgtcgttaaaatcggaccatccttagtcacgataactgtatgctcaatttgagcaacaaaacttttatcgctcgtttcaaaagcccattcatttttaccttctgtaacgaatgatgcatttgatgagataaacggttcaatagctaataccataccttcagttaataatgttttgtcttttggatcaaagtaattaagtacatgtgctggcgcttcatgtaatgataaaccaacaccatgacctgttaagtttttaatgactttcaaatcattttgtctagctgtattatgcaccgctttaccaatgttgcttaacttagtacccggttttacttttgcaattgcattctcaaatgccatcgttgctacgtcacatactttttgtttcattggatcgcctgattctccaacgacaaatgaaatgcctgtatctgcataatagccattcttcaatgccgatacatcaatatttactaaatctccttcacgaatgacacgcttacttggaatcccatgtgccacctcttcattaacactaatacacgtttgaccaggaaaattttcatcatgaattggcgctgaaatagcaccgtattcttcaaataactctttcgcaatattattcaagctctttcgtagtgatacctggtttggttgcagcttgcattgtattgcgcactttagcgcatatgtatccaatttcttttaacgcttgtaattcttcttctgtttttacaatcattttatcccgttccttttttatataattataacttattatagcaaaaattctttgatatactaaagatgttactttagtattttggaaagtgagtgggacatagtgtgataaagaaaaaatatttctttatcgttgcaccccaacttgcattgcctgtagaatttcttttcgaaattctctgtgttggggccccgccaacttgcattgcctgtagaatttcttttttgaaattctctatgttggggcccgccaacttgcattgcctgtagaatttcttttcgaaattctctgtgttggggcccacaccccaacctgcacattatcgtaagctgacttttcgtcagcttctgtgttggggccccggactataattgaaaaatgcttgttacaaatgcattttattttagtcaactactaacaatataacattgtggagcccagaactttgattaatgtatatgaaaatcaaagtaatgcttaagcatgcttatttcaaatgttttacatacatgaacttttccaatgtacgatactattattataaagcgctcgctaagattttacgatgattagaggttaaaaaatgaacgatcaatggtataaacatttaattggtgccagaacaattaaaactggtattgccatttttttaacagctgtcttttgtatggcattagatttaacacctatctatgccattttaacagctgtagtcacaattgaaccaactgccaaggcatcacttattaaaggttatcgtagattacctgctacggtaattggtgcaggctttgcagtattatttacatatttattcggtgatcaatcaccttttacatatgcattgagtgcgactttcacgattctattctgtacaaaactcaaattgcaagttggtacgaatgttgctgtactaacatctttagctatgattccaggtattcatgatgcctacatattcaactttttgtctcgaacattgacagcgattattggactcgtgacatcaggtttaattaacttcatggtgtttccacctaagtattatggtcaggtcgaagaaaaattaagtaagacagatgccttgatgtataaattattttacaatcgctgccaagaacttatcttatcaagactgcaatctgataaaagcgaaaaagcatataaaaatattttcaatttaaacaatcaagttgaaacgttaataagttatcaacgtgatgaattaagctatcataagaaaaaagaatgtgattggaaattactcaaccaattaactaaacgtgcatatacgaatcgtttgtttatcactcatttatcaaatatcatttacttgcctaaaaatactcgtgttaacttttcaggtgacgaaaaaatggcattgctaaaaattagtagtagcatcaaagatattttttatgatggttcttttaagagagaagatgattctgtagaaactttacgttcgacaataaaagcacttgaaattagtggtgaaaatcaaattaaaagtcatatactgtatgaagttttaatgatttatcgactgctagacaacagatatgcataatttaagtaccttatgctaattggcaccattagatatattcttactttataagtaattttatcgtatatagcatctccctttttaaaattacaagcataaatattcagattcaaatatagccacacgcctaaactacggagggatgtggctgtcttttttgattgtaattgtgtatcagatttaaatcattaatgcaaagaggctaattcattaataaatttagtaaaatctgatttagcaacatttatccttaaagaaataccagattctgttgccatgtttgaatgccttaaaccagaatcaaaatcaatataaatacaaagcagttcttgattaaaatcaataatcgtaaaatgtaaatcaggttctataaaatatatttcggtaactggattatcgtattcaatatgttttaaattgtccatgtcactatcaaaaagtgcaaattcaaattcaaattcttgatcttcgaaagttgcactagtgtcgaaataataaattttattatcttcttcgataactacatcttttaaaataaatgttatcgatgttttgctatgtaaataagatgcatcttttaaaatcactttagtagaattcatcgttaaattcctttcatcattcattttttcatgttgcataattaccattactattgataattctatgatagattctcattgtataataattattcactagaacaaaaaaacacacatcaatttggttgtttccatccaaaataatgtgtgtgtttatacatatatgattaattactaaacttcatcgtttatcaattttaaatccattgatgtgatgttcagagttaacgagatttcttctgtctatttgctctgtctattaatacttgtttcgcttgcttttccgcttcattatctatttctttaggctcaaacggaatacccttacgttcacaagctttttctaacagataatcagtgatttcgtaatttttaggtaaaattggtccgtgtaaataagtacctaataaatttttataatgaatgccttcttttctatcttcatcattattaccataaccaaaagtaacatgaccaagtgtaccgaaattatgatatgttctaccaccgtgattttcaaaacctacaatagttccaaaagtatcactttctataacaatatctcctgttaatcggtttgtctttgattcagtataaaaatctaaaatacctaacccttctaattctgtaccatcaggcgtgatatatttttttcctaaaaattgatagcctccacaaattgttaatcccggcataccatcttcaatcgcttctttaagtggtgtcttaattttacttaattcttttgttgctaatgcttgttctctatcacttccaccaccaataaagaaaatatcacattcatcaaaggtaataccttctgtttcattgatttctacgacattaactttaatatttcgtttttttgcacgttgtcttaaagcaataatatttcctatatcactgtataaattcaatttatctgacataaaatgataaatagtcaattcatgcatattatgattgacctccttcaaacgaacggtttaattgttcaagcataggcgctaatgatgtatagtttggtattgcaactgtgaaacctttataatccatagtctttgccgttgctttataaatatcacgctcaactataattggtacttcaacctctgctaacttcaatcgcaattgaagttcttctgctcgtgtacctgtcacgatgatagcttcaatttgttgcttagataatttttcaaaatctgcatcataaatccatgaagtatctcgaccatctgcagcgttatcatttagcgaaataacatacactttttcgccttctaattgttcaccaactgataaacttgcattcattcctgcagggtttttagctaaattgatcatcgcttcttttcgttcttttttaaagtactgcatacgaccattgtctgatgtatacgtttcaaagccatttttaattgcttgttcatttaaccctagctctcttaaaactgtatatgctgctaacgcgttataagcgttaaagtcacctgctattttcatatcatatttttcatcattaatatttaaatgtaaaaacggtgccacatcaaaacttgatatttcatattttgcttgctctcgtttgaaaccacactgacagtgataatgaccaatttgattataatgaatataatcgtattgcaataagcgaccacagtttggacaatatctactttcattcatcgtactttgttcaaattcatgggcatgtgctttcataccatagtacacaatcgtatcacttgcgattttcaaacgactcacaaatggatcatcagcatttagcaataatttgatgcctttattactaattgtctctgcaatgttattaaccataatatcaatttcaccgaagcgatccatttgatctctaaagaaattagtaaataccatcattgaaggtgtaacttcttttaacacacgtggaatcgaaccttcatcaatttcgattaccgcaattttagtcttaggtgttgattgcatgatgaatgcagaagttatacctgcagccatattagcaccttcattattgtgtataatttgaatattatttgcttttaaagtatgtccaattaagtttgaagtcgttgttttaccatttgttccactgataaatacaatatcatcaacttgctctgctaattttcttaatatatctgtatccacttttctagcaatttgtccaggtaaatctgttcctcttttacctactgctctacttgctttacgcgccaattttgctagatggattgccgtccactgtctcatgtgtttcctcctcaaatttccactcgcatcattataacatgacaaggcaacttcaaaaaagtttctcaatcacaaattgatacagcgtttctaaattataatcattctcatttagataattaaaaatgatatttattctcaattaaatctcgctaaatgatacattttctcaattagagtgctaaaatcgggtattaaattataattattattatttacaattgagaatgagtttgttatactaagtttaattcatagtaattttaatttacaaataagaggtgtatcaaaatgttaagtaaaaatttattagaagcattaaatgatcaaatgaaccatgagtactttgcagcgcacgcatatatggcaatggcagcatactgtgataaagaatcgtacgaaggatttgcaaacttcttcattcaacaagctaaagaagaacgtttccatggacaaaagatttataactatattaacgacagaggtgcacatgcagaattcagagcagtttcagcaccaaaaattgacttttcaagcatactagaaactttcaaagacagcttatctcaagaacaagaagtgacaagacgtttctataacttatctgaaatcgctcgtcaagataaagattatgcaactatctcattcttaaactggttcttagatgaacaagtcgaagaagaagcaatgtttgaaactcacatcaattatttaactcgtatcggcgatgacagcaatgcattatatctttacgaaaaagaacttggcgctcgtacattcgacgaagaataattaaacatcactacaatagacagataaatatcatacgacatgatagacatttgggtcacttacaataacccaatgtctatattattttgctttacggagatcactagattcattttctgaatcattgatctgcgttttttcattttcaaggctaattattgtatttttagtcatttattttttaaactactaatgttaataactctaaatttaatgttgtattaatttgaccgattttaaagcatatcatcatttactttttaatcagagttacatccaaataatagatttcacgttataccttcacgtataatattatgtatcgtttgtaagcaaatgactaaaaagtttattaatatatacatttaattaattgaaaggattgactacatgatacaagatgcgtttgttgcacttgattttgaaacagcaaatggtaaacgtacaagtatttgttctgtcggaatggttaaagtcattgatagtcaaataacagaaacatttcatactcttgtgaatccgcaagactatttttcacaacaaaatattaaagttcatggcatacaaccagaagatgttgaaaatgcacctacgtttgactacgtatttccatatatgatgcaatttattgcagatttacctgttgtcgcacataacgcggcatttgatatgaacgtcttacatcaaagcattcaaaatattggtttaccaactccaaatttaacttacttttgtagttatcaacttgctaaaagaaccgttgattcgtatcgatacggtttaaaacatatgatggagttttatcaattagattttcatggtcatcatgatgcattgaatgatgccaaagcatgcgcaatgattacttttaggctactgaaaaattatgaaaatttaacatatgtaactaatatttatggtaaaaatctaaaagataaaggctaagactaaataaaatactcccttcaaagtaagcattgtaaaaatgtaaactttgcagggagctttattttatataaagtcatatatcgtcatatttttataagttgattgttctaaattacctacagtgacaccaataagtcgaattggtacatcagggtcttttaaatcgttataaagtaaatatgcaatattataaatatcttcttcagaactaacagaatctcttaaactcatctgtttagataacgtttcaaattgataagttttaattttaaccgttacagttttagccgacttctgtaatttatttagacgttcagctgttttacctgacaactcccatacttttcttaaaatctcttcatcatcattcacgtctgttgcaaatgtgcgttcagtccctactgattttcttactcttgttgatttcacttcactatggtcaataccgcgtgccttgttatataaaccccgacctctttttccaaacaaacgtattaattcaaattccgttttctcatataaatctctaccgttaaaaataccattatcatgcattacttttttggaagctttacctacgcctggaaaatctccaatatccaatgtcatcaaaatatcatggacatttcgataatcaatcacagtcataccatcaggtttattcataccactcgctaatttagctaaaaatttgttataagaaacacctgcagatgctgttaaatgtgtctgctctagaatatcttttctaatatactgagcaattttcgaagcaggaaggtctggtctcactaattctgtaatatctaaatacgcttcatctaatgacatcggttctaccttatctgtataactacggaaaatagacataatctgcgcagatgtttctcggtaagcaccaaaattacttgtgacaaagtatccatttggacataatttatgcgcttgtgacataggcattgctgaatggacgccgtattttcgtgcttcataagatgccgtagagacaacgcccctactacttgctttaccaccaacaatgactggcttccctttcaatttggggttatctctcatttcgacttgtgcaaaaaaataatccatatctatatgaataattcgtctctcagtcaagtgctcacctccctactaatttttacttttataacgcacaaaaatatctcaatataattatacgctgtgtacgatttttttacataaatcttgcacttagcgataactatattgagataactataagttgttataaaatcaattgctatttaagcatgatgatgaagacgattgagtaagaaaacatcggtaatctgaaataattcaagcaaattcattttgctgatatcatcatattaaaatttattattgagtcggcttttgatgatacaaataaatactatcttcatcttgttgaacatatttaaaactactagatattgttaatgcaacaagcagaatatctataaagcaataagcggtatgcatactaaacataaaaataagtgatgaataaccaaataccttaattaaaataagcaagccagtacttaataggattagtggtgacagcataataattgagaattgccatttgttgaagcaagcatctgctgtttggaataagattctgtctttttttatattaaacataggtttgctatcttttttaaataacagaaataatgctctatggataagttcatgtaaaatcaataaaataatgaatccagcaaacccatatacaagattgatgatgatattttgatcgacaaccgctgtgacacctaacgcccacttatacgtaaataaaatcacgaataacgcaataacaagttgcaagataataaaccttcgcatttgaaaattatttgtcgttaaatcaattttatgcattgccaaccctcccaatcatgacattcttattcttctttaaatatagtatacaatgtcacatttaatttaaaaagttcatatcaagaaagtaaattggctgtaataaaattttaatatacgacttctttcttcacttattaaggcgaaattttatctcaaatcatgtgcgctatttcaaattgaataatgccactgtctcaacatgtgttgtttgtggaaacatatctaccggtgttacctcttcaagttgatatttttcagataataataatgcatcacgttgctgtgttgcgggattacatgaaatatagacaatacgcttaggttctaatgtaagcaaagtctgaataaacgtttcgtcacagccctttcttggcggatcaaccattacaacatctggtttaatcccttgtgctttccattgtaaaataacttcttcagctttcccacagacaaaagttgtattattgcattggtttatagtcgcattttgttgtgcgtcttcaattgcagaaggtacaacttcaacaccgtatacatgttttgcatgtggtgccatatatagtcctattgttccagtaccacaataggtatctaatacaacttcattacctgtcaattccgcatactcaattgctttattatataatttctctgtttgttcagaattaatttggtagaatgactgatcacttattttaaatgtactatctgttaattgatcaataattgtatctttaccatatagcgttatagactgacgtcccataataacattagagtggctatcattaatgttttgtttaatgcttgtcacattaggaaatgcatctaatatcttctcaacaacagcatttttttgtggccactttttaccattagttacaaaaataaccatcatttcgtctgtatgatatcctgttcttacaaccaaatgtctcattaaaccttttttcaattgttcttgataaatacttacatttaaatcttttaaaatagatttaactttattcatcacttcttgatgttgtgaatcttgtattaaacaactttccatgtcaataatgtcatggcttctttgacgataaaagcccataataacttcattctgttcattcttaccaactggaatctgggacttatttcgatatctccaaggatctgtcatgccaactgtatcgttaatcttagaattatcaaaatgtgcttttcgctgaaacaaattaatcacttgttcctttttcatttcaagttgcgcttcgtatgataagtgttgaagttggcacccaccacatcgttcataatatatacatggcggtgcaacacgattctcacttctcgtatttatattaagcaacttacctatcgcaaagttcttttttactttgataattttatattcaatttgttcattaattaaagcttgtggtatgaaaataggaaagcgatctatttttacgacaccatgaccttcatgcgttaaatcaacaactgttcccgttttaatgtcatttttagctattgcttgcaaaattttacctccaaaatgaacaggttaggaacaaaattatgcgcttcctaacctgccattataaatttcactacttctgtttattcttcgattaaattgtcatcaacatgagcattatttattaactcttcatttacaatatcatttggtgcaaagacatctatatgacgttctagattcaagaaattcgctggtaatttaccaccatattctccatctacatttagttgtaagtctgtgaatgatgaaatattaattgcctttgctttttcataaataactttaggatgcttagtatgttctcctcttgaagctaaagtcataatatgaccaagttctgcaaggtttgatttttcaactataattaacgtaaaatagccgtcgtctaacttagcgtccggcactaatttttcaaatcctgccattgaatttgttaaacctaaaaagaataataatgcttctccttggaaaacattaccatcatattcaattcttaaatctacagctttcatttgaggtaacatttcgaaacctttgatgtaataagcaaatggaccaacaatagatttcaatttactcggtgtttcataagagacttgcgtcaattgtccgcctgcagctaaattaataaagtatcgattattcattttaccaatatctactttagtagaatgaccttcaatgatgacatcaagtgcccccatgatgtcattaggtatatgcaacgcacgtccaaagtcattaacagtacccataggaatgacacctagcttaggacgattaggcttttctgcgataccattaactacttcatttaatgttccgtcaccacctgcagcgattaatacatcataattttcatgcatagctctttctgcttcaagtgtggcatcacctattttctcggttgcatatgcactcgtttcatatcccgctttttctaattttattaaggcatcaggtaattctcttttaaattgctctttacctgatgtcgggttataaatgattctagcacgtttcctcatatcttatccctctacttaaaattcatatattttaacttcatcttggtttcgtctaatagggagtgggacagaaataatatttaacaaaatttatttcgttctaccccaacttacattgtctgtagaatttccttttgaaattctctatgtttggggccccaccccaacttgcacattattgtaagctgacagtaagtcagcttctatgttggggccccactagaattgaaaaaaagcttgttacaagcgtattttctttcagtcaactactgccaatgtaacattgtagtgcctaggatattgaatttatgacccaggctcagtcttatttcatcattcttaatatcgttaaagaccaacttgtatcttaaacaaatactatctcaatatgtacaaaggttgttatttattcagcattttttgccgttcttcgttatatagacttcgtcagttatgctattttacctttaaaatgatgttgtaaatataatgttgtctttatacaaaaatgttttatacctttttattatacagtttgccttaatataattaaagctaacgcattaataaaattaatatttttaccattaacatgtacaatgaataaagttaaaagtaatatgacttctatagatataaataaaccctcgattgcatctaagtcagcaaccaagggttcattgttatatcatcatagtctgatgaatctaattatcttttatctaattcttgttttaatagttgatttactaattgtggattagcttgacctttagacgctttcataatttgaccaactaagaagcccatagctttgcctttaccatttttgtaatcttcaactgattgttcgttattgtctaatgcctcatttacaaattttagaagtgttgcttcatcagaaatttgaactaagccattatcttccataatttgtttagcattaccacctttagctgctaactctgggaagactttcttcgcaattttactgctcattgttccgtcttcgataagtttaatcatacctgctaaattttctggtgttaatttagtatctaataattctacttgatttttatttaaatattcgtttacgccacccattaaccagttagatgttaatttaacatctgcaccgtgttcaattgttgattcaaagaaatctgacatttctttagtcaatgttaatacgtgtgcatcgtatgcaggcaaacctaattcatttacatacttagctttacgctcatctggtaattcaggaattgtctgacgaacacgctctttccaagcatcatcaatatataaaggtacaatgtcaggctctgggaagtaacggtaatcatcagaaccttctttaacacgcattaaaattgttttacctgtagattcatcgaatcgacgtgtttcttgtccgatttccccaccatttaacaattcttcttcttggcgtttttcttcatattctaaacctttacgtacatagttaaatgagtttaagtttttcaattcagctttagtaccaaatttttcttgaccatatggacgcaaagagatgttagcatcacagcgtaaagatccctcttccatcttaacgtctgatacaccagtgtattgaataattgaacgtaatttttctaaatatgcatatgcttctttaggtgaacgaatatctggttcagatacgatttcaattagcggtgtaccttgacggttcaagtcaactaatgaatactcacctttatgtgttgacttaccagcatcttcttccatgtgaagacgagtaataccgattcgttttgtttcaccgtcgacttcgatatcaatatatccattttcaccaattggttgatcaaattgagaaatttgatatgcctttggattatctggatagaaatagttcttacggtcaaacttagattctgttgcgatttccatatttagtgccattgcagcacgcattgcccagtctactgcacgcttattaacaactggtaagacacctggatatgctaagtcgataacatttgtatttgagttaggttctgctccaaaatgcgctggtgatggagaaaacatttttgagtccgtttttaactctacgtgaacttcaagtcctataactgtttcaaaatgcatgatttccactccttataatttttcataaacgtcatgtaaattgtattgtgtttcatattgataagcgacacgatataacgttttttcatcgaatggtttaccaatgaactgtaaaccgattggtcggccatttgattgtccacaaggaacagaaataccaggtaatccagctaagtttactggtgttgttaataaatcattggcatacattgttaatggatcatcaatttcttcacctaaattaaacgcagttgtaggcgctgttggaccaactactacatcataattttcgaatactttatcaaagtcatttttaatcaatgttctaactttttgagattttttatagtaagcatcgtagtaacctgaacttaatgcaaatgtacctaagaaaatacgacgttttacttctttaccgaaaccttcagatcttgacattttatataattcttctaatgaatgagcttctttagaatgataaccataacgaattccgtcaaaacgagaaaggtttgacgaagcttctgatgatgcaatcacgtaatatgatggaataccaaatttagtatttggcaatgatacttcctcaacgacagcacctaaagattttaaagtttctacagcgttttgaactgcttcttttacgtcatcagctacaccttcacctaagtattctttaggtaatgcaacttttaatcctttaatatctttaccaatttcagatgtaaagtctacatcatcaacaggtgcacttgtagagtcattagcatctgcaccagaaatagcttctaatacgattgcattatcttttacatttcgagtcaatggaccaatttggtctaatgaagatgcaaatgcaactaatccaaatcgagatacacgaccgtatgttggtttcataccgacaacgccacaatatgcagccggttgtctaattgaaccaccagtgtctgaacctaagctaaatggtactaagcccgctgcaactgctgctgcagatccacctgatgaaccacctggtactgctttatggtcaaatgggttaactgtttttttgaaataagatgtttctgttgaaccacccattgcaaactcatccatatttaatttaccgattaaaacggcattctcattatgtagtttttccattacagtagattcgtaaattggcacaaaaccttctaacattttacttgcacatgttgtttctaatccgtttgtaataatgttatcttttatacccattggaataccaaataatttgccatccatttggtcttttgcttgtaattcatccaattcttgcgcttttttaattgcattttctttatccagcgctagaaaagacttaattgttggatcagtctcttcaattgcatcatatatatctttaacaacatcagatggtttgatttttttgtctttaattaaagttaataaattctcaaccgattcgtagcgaatgctcatcttacgcgtcctcctcattcatgattgtaggcactttaaattgtccatcttctgtttctttggcatttttcaaagctaattcttgcggaatacctttaattgctttatcttcacgtaaaacgttttgtaaatctaaaacgtgatatgtaggttcaacgccttctgtatcagcgctatcattttgttttgcaaaatctaaaatgctttctaatgtgttggccatttcttccgtttcttcaggagaaatttgaagtcttgcaagattcgcgatatgctcaacttcttcacgtgttacttttgtcattaataaaagcctcctttaagtcattcatcactaaattgtatcaaatttccaattaaaaatctaagtatttatgaggtactactttaatttcatataaactgtataaacattatcattcgtttaccaaatcattttttatgaaaacaacacccttttattattagacaacccaattcaatattatgattatgcaattttaattataaaaatttgctcatatctaaaaaatacgaaagcgttttctatattggtatacaagtatttcaaaaagaataaatttaattttcctacttttctaaacatttatctttatgtataatgttttcaagtaactaaattataaattaaataaagggagtgtttatcatgcttacaatggggacagcattaagtcgacaagtagatgccaattggcaaacttatattatgattgccgtctactttttgatactaatcattattggcttttacggttacaagcaagcaactggtaacctaagcgagtacatgttaggtggacgtagtattggaccgtatattactgcattatcagctggagcttcagatatgagtggatggatgattatgggtctacctggttctgtctatagcactggtctatcagctatgtggattacaatcggtttaacattaggtgcttatataaattactttgttgttgctcctagacttcgtgtttataccgaattagctggagatgcaattacattaccagatttctttaaaaatcgtttaaacgataaaaataatgtgttaaagattatttctggattgattatcgtagtattctttacattatatacacattctggtttcgtatctggtggtaaattatttgaaagtgcttttggattagattatcatttcggtttaatattagttgctttcattgtcattttctatactttctttggtggatatttagctgtatcaattacagatttcttccaaggtgtcattatgttaattgcgatggttatggtccctattgttgctatgatgaatttaaacggctggggaacgtttcatgatgtagcagctatgaaacctacaaatttaaatctatttaaagggttatcatttataggaattatctctctattttcatggggattaggttatttcggtcaacctcatatcattgtaaggtttatgtctattaaatcacacaagatgctacctaaagctagacgtttaggtattagctggatggctgttggtttattaggcgctgtggctgttggtttaacaggtattgcattcgtacctgcttatcatattaaactagaagatcctgagacattattcatcgtgatgagtcaagtactcttccatcctcttgtaggtggtttcttacttgctgcgattctagctgcaattatgagcacgatttcttcacaattacttgtaacatctagttcattaacggaagacttttataaattaattcgtggtgaagaaaaagctaaaacgcaccaaaaagaatttgttatgattggaagattatctgtattagttgtagcaattgttgccatcgcgattgcatggaatccaaacgacacaattttaaacttagtaggtaatgcttgggccggatttggtgcatcgttcagtccacttgtgctatttgcactttactggaaaggtttgacacgtgccggtgctgtaagtggaatggtttcaggtgccttagtcgttatcgtttggattgcgtggattaaaccattggcacatatcaacgaaatattcggcttatatgaaattattcctggatttattgtaagtgtaatcgttacatatgttgtaagtaaacttactaaaaaacctggtgcatttgttgaaactgacttaaacaaagtccgcgacatagttagagaaaaataattcataagtcttaacaaattaaaaaggtactaatgttaatcaaaattatgactaacattggtacctttttattatctttaatttacaattaattactgtaaatatgaacttgcggttctttgtcatcttttgtcttactaattaaagcacgtggttggttaccatctttaatccgaatttcatagttatcgattttatcgaaatatttattcgcttgttcagtaacgtactgtgtaataccaattgtttcagcttgtccatagtaatcgattggtaaatctactactaatcgttgtggctttttatcaacaaatttaacttttcctactgcttgtgtgaaattagaaaaatatgattgcaaattatcattaaattgcttgaaattattatttaaattttcatcataatctgctgctgttgaagaaggtaataaagctgatttttcattgatattatgccattcattaagctttgtttgacttttttctgcagtcgcttgagtgataaattcacctggtgtgattgaatcttcacttgattgcttataaattgcaaaatgaattggtatatcttttaaatcatcattttcacgtaaccttgataatatctcactagccatttgtttaccttgctttttaacttcgctatcatctagttttttactaaaagtcggtccatctttttcttttttatagtaataaacactattcatagctaaaccaatcgtcatacctttaatattcttaccttttgtatctccaccaccataaaaatcttgctctaaaatgttagataaataggctggtgatttttctgcaatcttttcaggatctgtttcaccttcgtgtgatggattaagtcctaaattttcattcgctttcttgtcttttttatctttttcagacattttatcgatttcacgttttgtatacttaggatttaaataggcattaattgttttcttgtccaaaaattgaccatcttgatacaaatatttgtctgttggaaacacttctttacttaagttcaataaaccatcttcaaagtcgccgccattataactatttgccatgttatcttgtaaaagtcctcttgcctggctttctttaaatggtaacaatgtacgatagttatcaccttgtacatttttatccgtagcaatttcttttacttgatttgaactattgttatgtttttgattatcttttccagcctggtcatccttatggttaccacaagcagcgagtataaagatagctgtaatcaataatactaatgtacgcttcatcgacatacccctctaactatttaattcattttgcttatctacaaattgttgctctgtccaaatttcaatacctaaactttgtgcttttgttaattttgaacctgcatcttcaccagcaataacgacatctgtatttttagtaacgctacttgtaactttagcaccttgtgatgtaagccatttagatgcttcattgcgtgtcatttgatgtagcttaccagtcagtactatcgttttaccactaaattcaggatgtccttcaatatctgatgttttgatacctttataaatcatattaacatgtttatattttaatttttgaattaaagcacgaatatcttcattttctaaataagtaactacagattgtgctactttatcacctatatcatgaatttctactaattccgcttcagttactgttagtaatcgatctatcgtttcatatttttctgctaacacttggctcgctttaacacctaaatgcctaatacctagaccgaataataaattttctaaagagttgtcctttgcttgttgaatggcagctaataaattatcaacttttttctgccccattctgtctaaaggtaataaatcttcttctgttaaatagaaaatatcagcaacatctttaattaattcgctttgataaagctgttgaataattttagtgcctaaaccatcaatattcatggcttgtcttgatacaaagtgaatcaatccttcaacaagttgtgcttggcattttggattaatgcaacgaagtgctacttcgccttcaatacgtactaattcatgtccacaacttggacaatgggttggcatatgatatgtgacagcatcctcaggtctacgttctggaatactacgtacaacttcaggtatgatgtcacctgcttttttcactacaacactatcaccaattcgaatatctctgtcatgaattaaatcttcattgtgcaaggatgctcttgatacagttgtaccagctacttttactggttctaaaatagcagtaggtgtgactacacctgtacgtccaatacttaattcaatatctaataatttagttaccacttcctcagctgggaatttataagcaatggcccatcttggtgatttttgtgtgaatcccatttcgtcctgctgatctaaatcattaacctttatcacaataccatcgatatcgtatggcaatgattccctttggcttgtccatttttcaatatattctaaaacgccatcgatatcgctgacgcgcgctctatttttattcgttgtaaaacctaatttatctaactcatctaatgcttcactttgcgaacgcgcattgaaatcggtgaaatcattgacactatatataaatacgcttagctttcgttttgccgttaatttagaatctaactgtcttaatgaccccgcagctgcgtttcttggatttgcaaataactgctcatcatttttttctttttcttcatttaatcgtaaaaatgaacgtctcggcatatatgcttcaccacgaacttctacatttaatggttctttcattttcaaaggtatcgcatgaattgtttttaaattttcggtaatatcttcacctgttgttccatcaccacgtgttaaaccttgaacgaagtatccatcaacatatttcaatgatactgctaagccatcaatttttaattcgcacatatattcaacgttgccaatttgttcacgtatgcgttggtcgaattttctcaaatcatcctcattaaatgcattccctaaacttaacattggcgtgtcatggttgactttattgaaagaggcttgggcttcaccgccaactctaactgttggagaatctacagtcttatactcaggatgctcctcttctattttaatcagttcatgaagtaatttgtcatattcactgtctggtacagatggattatcctctacatagtattcataactgtattgatttaataaatcatgtaactcgttcacacgagacgataaatcagccatcccttaatcctcctttttttcaattggtgcaaattgcgctaacaaacgttttggcccttgtgatttaaagataatatctagttcgattgagccatttttctcgtttacattactcaccatgccttctccccaggctttatgcatcactttgtcacctacattccaatcagatgacgatacttgttttttcgttgacgttgttcgttgactaaatccacgtttagcaaaaggttttgccttaggttgtatcgtttgtcgtttgccacttgaatgattttctaatagtgattctggaatttcctttaaaaatctagacggcatatttgactgagggcgaccaaataacattcttgatgtcgcatgagtgatatataacacttcttcagcccttgtgattgctacataacaaatacgacgttcttcttgcatttcatgatcatcttcactcttaatcgctctaatatgtgggaataatgattcttccatccccattataaagacgattggaaattcaagacccttagccgagtgcatcgtcattagtgttacgccattttcagtatctgcctcatcaatatcagctactaacgataaatccgttaaaaagttaattaatgactgttcttctaatggggtattttcctcatagtcttttggtactgacataaattcatcgatgttttctaatctacttcgagattctagtgtattttcacgttcaagcatttctcggtagccagacttttgtaatacttcatcaactatttcatgaatttctaaaaattcttgttcttttatcaagctttggattaactcgtaaaaattaagacactcttgtgtcaccttttttgataatccgataaaatcagcttctccaagtgcatcaaacatactgatattgttttgaagtgcatagttttgaactttttcaacagatgaaggacctacacctctttttggaacattaataatacgttgcaaactaatgtcatcattactattggcaattatacgcaaataacttaataaatctttgatttctttacggtcatagaacttttgtccaccaaccattgtgtatggcatattagatttcatgaatgtttcctcaagtacacgtgattgtgcatttgttctatataaaattgccatatcttgatatttcttaccattacgttgatgcttcataatttctcgtattacaaattccgcttcatcacgttctgtcattgcttcatagtaatgaattttctcaccattcgtatttgcagtccacagtccttttggcttacgttcagaattatttttaatcacttcgttagccgcatttaaaatcgttttcgtcgaacgataattttgctctaaaaagattgtattcgcttctgggtagtctttttcaaatgataagatattttgaatatcagcaccacgccaaccataaattgactgatctgagtcacctacaacacataagtttttaaacttacttgctaataatttaactaatgtgtattgtgctttattggtatcttgatactcatctacatgaatatattggaatttgttctgatagtattctagaacttctggtacacgctcaaataagttaatcgttgtcataataaggtcatcaaaatctaacgcttcattacgtgacaattggcgttgatatccactataaaccgttgctaccatttgcgagtgataatctgtggcttctttttgagcatctgcaggtgttttaagttcatttttcaaattactgatcgcaccgataaacatacgaggttcaaactttttactatcaatattttcattttttaagacgtctttaataacagatttttggtctgtaggatcaattatcgtaaaattgcgttctataccaattcgatctgcatcacgacgtaaaatacgcacacacattgagtggaatgttgacatccaaatcacttctgcttgatcacctactaatttttgaacacgttctttcatttctcttgcagctttatttgtaaaagtaatagccaaaacattgtatggtgagacatctttttcgtctaataaataagcaattctatgtgttaaaacacgtgtcttccctgaaccagcacctgccataattaacaatggtccttctgttgtctttacagcttcactttgctctgtattcatatgatttaataacgcattcatttactagactcctttatttttactgtttttaaagcttttttaatatctttataaataatatcaccgacgataattgtatctgcaatagctgccatctctgtcgcttgttgttctgaggaaataccgccaccataaaaaagttgcgtttttgttagatgttctgagacagcttgaacctttgatacgtcgccataaatgccactatactctatatacataaccggtaatcgatacatatgattgaccatttgggcatatgcttctaaatcttctgttgttaaatctgtatttgctttggtatgttttgccactttgctatcagcattgcacacgacatacccttcaaatattacttcttcaaaatctatactatgtccatatgttttaagcgcttctaataatgtaccattgtgaaatgcaacatctgtactgttcagtactgtaggtacaaaataaaaatcaaaaccaggcattacactttcgatgtttgatatttcaagtactaaaggcaatgggtatcttcttactctgctcattaaatgaatgacattatcttcagtaacgtcatcagttccaccaatcataattgcatctgtttgagacatacaaatcgcatctaaatcatcatctgaaatatgtttagctgggtctaatttaaaaatatggcgccattttttaatgtcatacattttccgaaactccttttttaacatacatatgattatagcatttttaagtgtcgagttctaaagacttaatatgaaatttaagttcttttactctgtaaattttttcgtgaaaaaacaatgattatctaccttattagtgcagatagataaccattgtttatcgttcatttattattcatttgtttcaatattcatacgatctaaaatcattgtataagcatcattaccccattgtaatgaacgcttcactctagaaatcgttgcagtcgatgctccagattcttgttcaatcgttgcataggtataaccttgcttaatcattttagcaacttgtaatctttgagacagtgattgaatttcatttacagtacacaaatcatcgaaaaattggtaacattcttctctattttctaacgttagtattgcatcaaacaattcatctaacgctgcacctcgtaatttttcaatttgcatatcgaaacaacccctataattttattctttatgtcattttaacgcattaatctattaaagtgtagcgatttatattttattaaatctgaatcgttactttatttaattttatgctaatccagcgcgttcgaaaatagtgtcaacttgattcaaatgatgtttaggatcgaaacattcatccaattcttcttttgttaaaacacttgtaatagactcatcttgttcgattaattcacggaaaggtgttttcgtttcccaagatatcatcgcttttggttgtactttgtcgtatgcttcttcacgaaccatacctttattaattaatgctaataagacacgttgtgagaaaatcagaccaaatgttttatctatgttattacgcatattatcttcaaatacagttaaacggtcgacaatattcgtgaaacgattcaatgcataatctagtgctattgtaacatctggtaacataatacgctcagctgaagaatgagaaatatctctttcatgccataatggcacattctcataagctgtagtaatataaccacgaatgactcttgaaatacctgtgatattttcagaaccaattggatttcgtttatgaggcattgcagatgaacctttttgaccttttgcaaatgcttcttcaacttctcttgtttctgttttttgaaggttacgaatttcaacggcaaatttttctagtgacgtcgcgattaatgccaatgtcgcaatatagtatgcatgtcgatcgcgttgcaatgtttgcgttgatacaggcgctgtgccaatacctaaatgtttacacacataactttctatttcaggaggaatgttagcaaaagtacctactgcaccactcattttccctacttcaatttcttctcttacttgtttgaaacgttgtaagttacgttgcatttccgtgtaccacaatgccattttgacaccaaatgtagttggttctgcatgcactccatgtgtacgtcccatcatcaatgtatatttataattttttgctttttcagctaaaacgtcgataaatctttctaaatctttttcaataatgtcatttgcttgtttaataacgaaacttaaagctgtatctacaacatcagtagaagttaaaccataatgtacccacttacgttcttcacctagcgtttcagaaacttgtctagtaaaggctacaacatcatggcgcgtttcttgttcaatttcttgtgcacgttcgacatttacctttgcgttttgacgaattttttgtacgtcagctttcggtatatgtcctaattcactccatgcctcacatgctaaaatttccacttctaaccatgcttcatagcgattttgatcagtccaaatattagacatttcttctctagaataacgttcaatcatttttttaactcctatcgtatgtatactcgaattttcaaaaacagaacatttttaataaaaataaataaaaagttcgtttttaactctactcttcacagtttaacagaattggttataaatgtataaaaaatttccgtatattctcattctattttattttttacattaatacaattatctatggcagattaatactgatttctaattgtaaatgttcgcaacactttaatctaactggtatttataatgatccattaagaatatattattgcattttagtttttctcccctcaactacactatccaactttttattacaattaggacaatcaatagctttagtaataacaaatattattcactttacttctcctattgtatagaatttcaacaatctacttttcctagtttcataatattccttcttacattccataatgtgttttaaaattattcgcttctaatataacaaattttctactcacaaaaagaattgcataggtatggcattttaaatacaagacattaatattgaactcctcgagtcgtataaatacgaaagtgattatagaaaagtactcagagattttcttaatagtaaatttttatagacagacatcaattgactgcgtttctttcaaaatcgactaacatattttcatgaaacgttcgatcatattaattattgaatgagatgtttgcaatttagtaaataagctactaaattattgcataaactgataatgtctaataattaaatattttttaaacatagattaaaaatttatattgaaattcttaactaaatttaatataattattttataataaaagaaaggagtttttatatgaaaagaaactttccaaaattaatagctttaagtttaatattttctttaagtattacccctattgcaaacgctgagagcaattcaaatatcaaagcaaaagataagaggcatgtgcaagttaatgtcgaggacaagagtgttccaactgacgtacgtaatttagcgcaaaaagactatctttcttatgttacttcacttgataaaatctataataaagagaaagcctcgtatacacttggtgaaccttttaaaatttataaattcaacaaaaagagtgatggtaattattattttcctgttttgaacactgaaggtaatatcgattatatagttacaatttcaccaaaagtcactaaggattctagttcatcttctaaatacacaatcaatgtttcttcatttttatctaaagccttaaatcaatataaagatcaacaaattactattttgacaaactcaaaaggttactatgtggttactcaaaatcataaagctaaactagtactaaaaacaccacgtctagaagataaaaaggtaaaaaagaccgagagtatacctactggcaataatgtaacgcaactaaagcaaaaagcttctgtcactatgccaactagtcaatttaaaagtaataattatacttacaacgagcaatatgtaaataaacttgagaatttcaagataagagagactcaaggtaacaatggttggtgtgcaggctatacgatgtctgcattactaaatgcaacttataatactaacaaatatcatgcagaagctgtgatgagatttttacacccaaacttacaaggacaacaattccaatttactggtttaacgccaagagagatgatttattttggacaaactcagggaagaagtccacaacttctcaatagaatgactacttataatgaagttgacaatcttactaaaaataataaaggaattgctattttaggtagtagagtagaatcaagaaatggtatgcacgcagggcatgccatggcagttgttgggaacgctaaattggataatggacaagaggttataattatatggaatccatgggataatggttttatgactcaagatgctaaaaacaatgttattccagtatccaatggcgaccattatcaatggtattcatctatttatggttattaaaatttgtattttagaaaggtaaataatattatggaacaatttgaattatttagtattgataaattcaaatgtaattcagaggctacgtattatcttaatattattgagggagaatggcatcctcaagatttaaatgatagccctttaaaatttattctcagtacctcagacgattctgattacatttgcaaatatataaatacagaacacaaacaactcacattatataataaaaataatagctcaattgttattgaaatatttataccaaatgataataaaatactactaacaattatgaacacagaagctttaggaacttctcctagaatgactttcattaagcataaataataagactatctagatttatttaagtaaactattaatgttattaaaggtctctaggaagaaaaaatttcatgcgatgagattgttttagaaaaagcgacgatatatataatttaacaatgattttaaaatagtaagaacccccagcatatgctttatatagcttgctgggggtttttcatacaatatggattgagcatcttgcatgtataaacacataggctattcaaagtaaaattactcaaatttgaataacctttcctcttcaaatagtctttatttaaattggattatgttattggattttcttacctacaaaaatgatttcttgatgtgatacttcaaccgtgccatctttttgctcctgaaacacgggtttttcaatacgttttaccggcatatacccttgcattttcattcgtgacaaacaatcagcaattgtttcgttctcatttactttgaatttcatgttctactacactttccagttcttctggttcatagtctttaagctttctacgacgaatgcctttagtccagaatccaccatgtatgtttcgaggttcatacgcaatgataaatgctttcggatctaaattttttatcgtatccatcaatttacgttcatattttcttggtgttaaaatttgcatcaccatacgactaccatctctaccaaatgcagcatagtgcgtaacgccatatcctaaatttcgaagttcattcggtaaatctaactcatattctgctgaagttacatttacaactgtataacctaatgccagtttttcttctattttcataccaacaatgatacctattgaaaaaccaaatgcgtatgcaataatattttgaatatggtctaaattagacataaccaaacctaaaccaacgatataaactaatacttctaaaaaactaactgatgcagcaatataacgataacctttcaacgttaaaattgttcgcatcgttaaaaacgttacataacaaacgttaatgataaatatagttagtaccattaaccatggattttctgttacgaatgacataaggcgccccactctctttcaattacactttaaatatcaaactgcttcaaactaaccttaataaatgcatattaatataatatagtacgaaaactctcataaataaatagcgaatttgtcataattaaaatttattctcaaatgaacatacttactttatttcatacattatcaatttatatactgaagtagcctagttgaatgtggtttaacgttattaattctaactcatatttaatttaaggcacacgttagaagaaaaaattaaattaggattttggccacgtgtatcttgtatatgcaagttcacgtttgtgtgcattccgtatataatgattttcaattactttttgttcttctggcgtaactgacttaccttctaaataattatcaatcgcctcataagttacacctaatgcatcttcatctggaagctgtggtttatcatcttctaaatcagcagttggtgttttttcatacaattgttttggtgcaccaagataagctaataactgacgaccttggcgcttattcaaaccgaatataggtgcaatatctgcagcaccatcaccatatttcgtataaaaaccagttatattttcagctgaatgatctgttcctactacaataccttgtcggtttgaagcaattgaaaattgtactttcatacgttcgcgagccttttcattacctttttggaagtctgttaggacaatcccagcttctttcaatgattgcacactttgatcaactgcaggcttaatattgactgttactatttcatctggctcaatgaattgtaaagcttgctcaacttcatcagcatctttttgaactccataaggtaatttaactgcaataaacgtacaatcaatgccttcttcacgtaattcgttaacagacatttgtactaattttccaactaatgtagaatcttgtcctcctgaaatacctaacactaaagattttataaatgaatgtgattgtacataattttttataaattgttttaattccataatttcttcagcactatcgatacgctttttcactttcatttcttgtacaataacgtcttgtaatttactcattatcttcttccatctccttaacgtgttccgcaacttcaaaaatacgtttatgtttattatcccaacatgccttgcttaaatcgactggatattcttgtggattaaggaaacgcttattttcatcccaaatagattgtaatccttgtgctaaatattcacgtgattcatcttctgttggcatttgatatactaatttaccattttcataaatattatgatgcaaatcaatggcttcaaaagattttataaatttcattttataagtatgcactggatggaataattttaaaggctgttcatcgtatggattttcattttccaaagtaatataatcgccttctgccttacctgttttcttgtttataatgcgatatacatttttcttacctggcgtcgtaaccttttcagcgttatttgataatttaatacgatcactatatgaaccatcttcattttcaatagctacaagtttatatactgcacctaatgctggttgatcgtatcctgtaatcagctttgtaccaacgccccaagaatctacttttgcaccttgtgctttcaaactcgtaatcgtttcttcatccaaatcattagacgcgataattttagtttcagtaaatcctgcttcatcaagcatacgtcttgccgctttagataaataagcgatatctccagaatccaatcgaatacctacaaagttaattttgtcacctaattcttttgcaactttaattgcatttggcacgccagattttaaagtatggaatgtatctactaggaacacacaatttttatgtctttcagcatattttttgaaggcaacatattcatctccataagtttggacaaatgcgtgtgcatgtgtaccagacacaggtataccaaataatttacccgccctaacattacttgtagaatcaaagcccccgatgtaagcagctctagcgccccacaatgctgcatcaatttcttgcgcacgacgtgtaccaaactccattaatttatcatttgatgcaatttgacgaattctactagcctttgttgtaattagtgtatggaaatttacaatgtttaataaaattgtttctattaattgcgcttgaatcaatggtgcttctacgcgtaacaatggttcgttaccaaagcataattcgccttcttgcatcgaacggatgctgccagtgaattttaaatcttttaaatatgataagaaatcatccttgtagccaatagactttaaatattccaaatcagattctgaaaatccaaaatgttctataaaatcaatgacgcgttttaaaccattaaaaacagcatagccactattaaatggcatttttctaaaatacaaatcaaatacagccattttttcatgaatattatcattccaataactttcagccatatttatttgatataagtcattatgtaacattaaactgtcgtcttctaattggtacactcgtatctctccaatcgacctaaatattttcttacattttatcataattcatttttttatatacataagagccccttaatttccatacttttaattaaaatcaaccaacaatttaatgacatatacataatttttaagagtattttaataatgtagactataatataaagcgaggtgttgttaatgttatttaaagaggctcaagctttcatagaaaacatgtataaagagtgtcattatgaaacgcaaattatcaataaacgtttacatgacattgaactagaaataaaagaaactgggacatatacacatacagaagaagaacttatttatggtgctaaaatggcttggcgtaattcaaatcgttgcattggtcgtttattttgggattcgttaaatgtcattgatgcaagagatgttactgacgaagcatcgttcttatcatcaattacttatcatattacacaggctacaaatgaaggtaaattaaagccgtatattactatatatgctccaaagaatggacctaaaattttcaacaatcaattaattcgctatgctggctatgacaattgtggtgatcctgctgaaaaagaagttacacgcttagcaaatcacttaggttggaaaggaaaaggtactaattttgacgtgttaccactgatttaccaattacctaatgagtcagttaaattttacgaatatcctacgtcattaattaaagaagtacctattgaacatgatcattatccaaaattaagaaaattgaacttaaaatggtatgcagtccctatcatttccaatatggacttaaaaatcggtggcattgtgtatccaactgcaccctttaacggttggtatatggtaactgaaattggcgtacgtaactttattgatgattaccgttacaatttactagaaaaagttgcagatgcgtttgaatttgatacacttaaaaataattcatttaataaagatcgagcacttgttgaattgaactatgctgtgtatcattcctttaaaaaagaaggcgtatcaattgtcgatcatttgaccgctgcaaagcaattcgaactattcgaacgtaatgaagcacaacaaggtcgtcaagttaccggaaaatggtcttggctagcaccgccattatctccaacattgacgtcaaattatcatcacggatatgacaatacagtaaaagatccaaactttttctataaaaagaaagaatcaaatgctaaccagtgccctttccatcattaagttagtagaggtgtagcatatgcaattatattatttaggccctaaaggtacattttcatatttggcttgtcgtcagtatttttctgaaaatgaagctacttttcaaccaaagtcaaatttatttgaagtcatcaaggcagttgcagatgatgacgcatcgattggtgttgtccctattgaaaattctatagaaggaacaatcaacattgtggcagatgcacttgcacagcaagatgtctttgcacacggtgaaatacgtttagatattaactttgcattatatggtaatggttcgaacaccatttctgatattaaaaaagtgtattctattgcaccagcgatcagtcaaacaacaaattacatacatcaacatcaatttgactatgattatgtcgacagtacaattcaaagtttgactaaaattgaaaatggcgttgcagcaattgcacctttaggtagtggtgaagcttatggttttacacctattgatacacatattgaagactatccacataacgtgacacgttttttagttataaaaaatcagcagcaatttgatcaaaatgcgacatcattgatgtttttaattacaccaatgtatgataaacctggattgttagcaagtgtgcttaatacatttgctttgtttaatattaatttatcctggattgagtctcgtcctttaaaaacacaattaggtatgtatcgatttttcgttcaggctgattctgcaattacaaccgatataaagaaagtcattgctattttagaaaccttagatttcaaagtagaaatgattggtgcttttaattaaactttattttctaggttctacaatttaaataaaataaagagtcaaccaaggattaaaataggaatccatccttggttgactttcttttgtttgtattgtttttacacgatgctgcggtatacgtttcgttaccactcgttcaagcaattgctaatgtaacattttatttttcattctaatctgcaattattatttcaatggcagtggttgatttatatcaatacctaaaactataggcattacataatacacgactaaaataataattattgcactgattaagtttacccagaatcctactgatgccatttgtttgatagatattttacctgaaccaaagataattgcattcggtggtgtccctactggtaacatgtatgcacagttagccgccatagctgctggtgccataagtagtaatggatgcactccaacagcaacagataacgttgctaaaatcggtaaaatcatcgttgcagttgcggtattagatgtcacttcagttaaaaataggacaaagatcgttatgacgattacaataagaatcggactgacaccatttaatgatttcaactgttcgcctaaccattttgctaaaccactttcagaaatacctttcgctaatgctaaaccgccaccaaataaaattaatacaccccaagggagctcttttgcaacttcccagtcaatgatacggcgatgtttttcagtatttttagctggaataataaataataatattgatataaaaatagcaatcgtaccatctgcaacggatgacgtaacttcccattttttcagaagaaactctcttgtaatccataataagctggcaagtacaaagatagtttgtactaccttttcttcatacttcattttgccaagctcgtctaacttttgtttaattaacgtctgaccaccaggtaaatatttcaaatcatgtctaaacgcaacatatcttaaatagagccaagtaatacctaacaatacaatgaccgttggaatccctacaatcatccatttagcaaaactaatttcatgtccaaaatgttgcatgtattgtccttttaaaataattagcggcggcgttccgataagtgtacctaatccgccaatcgtacctgcatagccaattgctaaaactagagatttttcaaacttttgaatacttgtttgattcgtattggcttcttgtaaatcatgtgcttccttaataattgctaaaccaatcggaatcatgatcattacagctgcagtgttcgatacaaacatagataagaatcctgttgccaccatgaatccaagtaatatttttgaagtgcttgcaccaattaaattaataattgtcaacgctactctcgtatgtaaattccatctttccattgcaattgccaaaataaatccacctaaaaacaaaaagataatatcattgccatattcggatgatacttgttctggtgtaagtatgtgacctaatggtaataacacaattggtaataagctcgttgctgcaataggaattgcttcagtaatccaccaagtcgcaatccataaagtaatcgctaagacatagacgcctttccaaggtaaatcttgtggatgaaagaacaataatgttaataggaaaagtaatggacctaatattagtccaataagttgtcccgtagtaaacggtttctttttctttgattttgaaaagaatgttaaataccttttcgatatcattgattgatgttgattgaaataagccataaatttccccctcatgatgattatgacaagctacttcaactaactatattagagtatagaaagttgtctatcttgtattatcattaccgtcaaaataccccttttatcagataattgggtttattatagcatatttataccgttttatgaatgcgctttcaaaaattatccagtaatcttaatcctaatgtcatgcgaaactttttacttttttatttcatctacattgattgtagtaacttgaatacccgcttcaacaggacttaaaaacactgtatcaatatcttccaaatgaattgattgagtcgaattattgaatgtattcccaacgattaatacatctttatgtttaacattattataattacgtacatgtatcacatctttagacattgaccctttaaattcatttccaattatattcatatttattcctgcttgggaacctaagtcttttcctgtcatcacatctgcagcatttttaccatctctaactcctaaatatctaataccaccctcacagttaataaacttattattaataatgaaagcatctttatacttcaagggagttaatgcataaccttgtatatcttcaaatatattatttctaatatgaatattctcatagtaacgattatgtctacttgcatgtgagccaatagcacgattccaacttcccatttcgggcaattctgaaggtccaaaataacaatcttcgataatgacatttttcgttatcgtaccatctgtcgttccgaattttggaaaagcaccaggtacttgaatgtctaattgtattgcttcagaataaaaacgttcgccactatagtcaacgaatccttcaaatgaacagtttttaatatagagtccattaatcccacaagcatcaattgcatgaccactcactacattcttaatggttacacctattaattgaatatcttcagcatgtccaatgcacatagctgtattattataaggatacgatacgccattcatatcaaacttgccgcctttaatatgaatatgactgtgtccattataaccacgataaaaaccaaagcgatgaccattttttaataacggaccagaatgacatcgacgtaaaatagtttcattatccaacaaaagtgttgtattgccatatatcgttaatggtttgcaaatatcatacgtccctttcggtatataaactgtcgttggtttacatcttccatgatttaacgcacgttgtattgctcgagtatctttagttttgtttatgcctgttaacccataatctttcatattgatatacataaatcgtcatcctttgtctattttctaattactcatatattaaccaattattcaaattataatcgtgttaggttgatttagcagatagtcataaatctcgtgatgccatctattagcatttttatattcaaaacatcaacacttgatattagttctaagtttgtcacatttagtattctattacagctattttaaagctatcgtaaaaacatcttataatatttattgattgcgtgatttgctcttccaaaaaagttgattaatctatatacttaatctatatttatatattaaccattagggttaaaaattactctagcatttatgaatagatgggagtttattttattattatataggagagatgttgaatgacacatcgcgcactattagttgttgactattcatatgactttatcgcagacgacggcttactaacatgcggtaagcctggacaaaatattgaagattttattgtttctcgtatcaatgactttaattattatcaagaccatatattctttttaatggatttacattatttacatgacattcatcatcctgaaagtaaattattcccaccacacaatatcgtagatacaagtggtagagaattatacggtaaagtaggtaaattatacgaaacaattaaagcgcaacctaatgtacatttcattgataaaacgcgctatgattcgttctttggtaccccgcttgatagtttattgagagaaagaagtattaatcaagtcgaaatcgttggtgtatgtaccgatatttgcgtgttacatacagcaatttctgcatacaacttaggctataaaatttcagtacctgctgagggagtggcttcatttaatcaaaaagggcatgaatgggcacttgcacatttcaaaaactcattaggtgcagaggtagaacaacacgtttaaatcgtgctaaaataattataaagaatacaatatacaagggagatatttgacaatggctaaaacatatattttcggacataagaatccagacactgatgcaatttcatctgcgattattatggcagaatttgaacaacttagaggtaattcaggagccaaagcataccgtttaggtgatgtgagtgcagaaactcaattcgcgttagatacatttaatgtacctgctccggaattattaacggatgatttagatggtcaagatgttatcttagttgatcataacgaattccaacaaagttctgatacgattgcctctgctacaattaagcatgtaattgatcatcacagaattgcaaatttcgaaactgctggtcctttatgttatcgtgctgaaccagttggttgtacagctacaattttatacaaaatgtttagagaacgtggctttgaaattaaacctgaaattgctggtttaatgttatcagcaattatctcagatagcttacttttcaaatcaccaacatgcacacaacaagatgttaaagcagctgaagaattaaaagatattgctaaagttgatattcaaaagtacggcttagatatgttaaaagcaggtgcttcaacaactgataaatcagttgaattcttattaaacatggatgctaaatcatttactatgggtgactatgtgactcgtattgcacaagttaatgctgttgaccttgacgaagtgttaaatcgtaaagaagatttagaaaaagaaatgttagctgtaagtgcacaagaaaaatatgacttatttgtacttgttgttactgacatcattaatagtgattctaaaattttagttgtaggtgctgaaaaagataaagttggcgaagcattcaatgttcaattagaagatgacatggccttcttatctggtgttgtttctcgaaaaaaacaaatcgtacctcaaatcactgaagcattaacaaaataatactatattactatctaattatagacatgttgtatttaactaacagttcattaaagtagaatttatttcactttcaatgaactgttttttatttacgtttgactaatttacaaccttttcaatagcagttttcattcctttagctatcctaacccgtagattagtgatttctatacaattccccttttgtctttacattttcttaaaatatttgcgatgttgagtataaatttttgttttcttcctacctttttcgttatgattaaagttataaatattattatgtacacaattcatcgctctattttcaactttcaatatatataattcgaaagaccatttaaaattaacggccacaacattcaaatcaattaatcactttttccaaaataatcatataaggaggttcttttcattatgaatatcattgagcaaaaattttatgacagtaaagcttttttcaatacacaacaaactaaagatattagttttagaaaagagcaattaaagaagttaagcaaagctattaaatcatacgagagcgatattttagaagcactatatacagatttaggaaaaaataaagtcgaagcttacgctactgaaattggcataactttgaaaagtatcaaaaatgcccgtaaggaacttaaaaactggactaaaacaaaaaatgtagacacacctttatatttatttccaacaaaaagttatatcaaaaaagaaccttatggaacagttttgatcattgcaccatttaactatccttttcaactagtgttcgaacctttaatcggtgctattgcagcaggtaatacagcaattattaaaccatctgagttgacaccaaatgttgcacgagtgattaaacgattaatcaatgaaacatttgatgcaaattacattgaagttattgagggaggaattgaagaaacgcaaacgttaattcacttaccttttgactatgtcttctttacaggaagtgaaaatgtaggcaaaatcgtttatcaagctgccagcgaaaatttagttcctgtgacattagaaatgggcggtaaatctccagtcatcgttgatgaaacagcgaatattaaagttgccagtgagcgcatttgttttgggaaattcactaatgccggccaaacatgtgttgcaccagattacattttagtacacgaatctgtaaaagatgatttaatcacagccctatcaaaaacgttgcgtgaattttatggtcaaaatatacaacaaagtccagattatggccgcattgtaaaccttaaacattatcatcgtctgacatcattacttaacagtgcacaaatgaatattgtatttggtggtcatagtgatgaggatgaacgttatatagaaccaacattgttagatcacgttacaaatgattcagcaattatgcaagaagaaatttttggtcctatcttaccgattttaacgtatcagtcattggatgaagcaatagcctttattcaccaaagaccaaaacctttgagtttatatttatttagcgaagatgaaaatgctacacaacgtgtaataaacgagttatcatttggcggcggcgctattaatgatacattgatgcacctagcgaatcctaaattaccatttggtggtgttggcgcctcaggtatgggacgctatcatggtaaatattcatttgacacttttacacatgaaaaaagctacattttcaaatctacacgattagaatcaggtgtccatttaccaccatataaaggtaaatttaaatacatcaaagctttctttaaaaattaatttttgagacaaaaataaaccatgcttccataatttgatgttcttgaaaacaatatatttcaaggtatacacaaattttttggaaacatggttttctttttatcatgattaattaaagattaaaatatgacacatacaccttcagatgctacacgagtgttatcacatagcgtaattttacctgtttctttatttctttcgaaaacagttacaactgaatctccttgctcatgagcacaaactaaaagatcatctgatgaggcaatattaaaatctcttgggaattgaccaccactttcagtaattgttactagttctaagtgttgaccattatcaagaactttaaaaattgcaatgctatcatgccctctattagatacatataagaattgttgatcatgagataaacgcactgctgcaagtttagtatctccatcaaagttttcaggaattgttaaatgacgctcgagctcttcaaatttaccgtcattatattctgcaacgctcacagtatttgataattcgtgtacgacataagcaaattttccattatcatgaaattcaatatgtcttgtcccatcactatctttaaataaagattctttataaaattcaaaaccgttgtcatcaaatttataagtaacgatacgatcagcacctaaatctgttactgcaacgtacttaccatctggagtttgattaatataatgtgcgtgtggatgatcttgtctttcatgtgtacctgttggaaaatcatgcgcaagttcttgaattaaacgtataatttcacctgtgtccgtatttaattcatacatacgtatgatgccagcaccatataccgcttcaaataaatatcgtttatcttctgaaatcgatacataacaacctgtaccagcttttgaagacaaacatttatttaataaatgcaattcaccattgtcatcaattttcaaactcgcaacaccgcattgttctccttctttgttgattccatataaaacttcgttattacgcaccaaatatgtagacgcttctaattcaaatcctgtttctaataaatcaatacgtgactgattttcgtttaattcaaaacgataaatccctttaccattctttttagtgtaagaaccaatatatccatttgtcattacttttacccctccatgttagtcttattttcattttattaaattttagctagaattaacaatcatttatcattcccttaaagctaaaactgtttaactactttaaaagaactatttgctggtgatatgtcattattcgattttaattaatccctcttttttacttacccgagcattaattattaacgcgtttatgcttccacaaaatttttgttgcaaaatagaacacatgttcgtataatgtaattatcagattggggtgaattaaggatgacaagttatgaagaagaaactgattatcgtaacgttccaagagaattactagataacaatatacctatgggaagaggcatgattaaatgggctccatttgttatatgtactaatctcataaaaaatctaatttaatagggttcaaacataatttatatatgtattatgtttgaaccctatatctatttattttttactaatatcatttaaaatgtctcgcaattcttcaatttctttgttatttaattcttcatttttcgcaaaattaagcactaaacttttcatatcccctccatacaatttattaagaaaggttttagcagttttcattttaatatcatcttctttaataattgatgagtaaaaataaatattattatatttatatcgttttataatctcttttttatatagtcttgtaattaatgttctaatcgtcttatcgctaacttctttatttttttgaatctcaactacaatttcattagctgatactgattttttattccatattatattcataacatcccattcagccatagatatttcaacttgcttattggccatttaaaacacccatttcttttaatattttttcatttatgaatttagcattttcaccagaggctttttcatctgataaatgtgtagaaaaataatacttatcatgatttgtaattacgtaacctacaaaccacccattattatatttcccgtttactatacctgtacctgttttcccatacaattcataattttcattttttctaatcaataacgaagaagataattgtttcttttcatttttactaaaatggttattttgttccatcatattttttaaaactattacttgttcaagattagatattttcaaactatcttccaaccaataggctttataacttcccaaatttttattaccataatttaattgcttgagttgatcagaagtataattctttgataattgattactaatacgttcgaagtaccaattaactgagttttgtattgccgtatttaaatcttgatccttattccaagaatcgaaaggataatgattatgattccatgacatacgtgaatttttatcacttataatatgacggtcaagtccaaacagtgctaaataaattttgtaagttgaatcaggagaatatctttttctactttctttttcattataaatatagtatttgtctttcttcatgctgtacataacgaaagatccactatttgaaccaaaatttttactttcatctaaaatttggtaatcgctttgtaagggctttttataattataatcagttaaggattgccccattaaaaactggctttgaattatcatgataaaaaaagtaaaaatacaaataaaaattagaattaattttgactgcttcttcagattgccttcttttatattaattaatcttcttttgagtaatgattttttaccattaaatgaatggcttaatatatttttgttgaaaaatgaggtttttaatacggaatccataatagcttccgcataagacttaaattcatttttgttaatattattaaggacaaatctatcggcttctacttcattgtcatgaatcatctttctttttacaatttgtattagtggattataactcatagcaatagaaaaaatatgaaagataattaaatgcaaagtatctctgtttttagcatgagcatactcgtgcaatattatatattttagttttttgtcatttatacttttaaaatataaactgggaatcaaaataatatattttccataccaaaaagttattggagaatgaatagattctgcttttcgaatcacaatatttcttttatattgatgattgaaaagtatcttgtttattttatctttttctttttcatttagataaagtgactgtttctttaaatacttaagatataataaagaatttaaaaatttaaaacttaaaataataactaaaactatccaaataactgtgcagatattatctattgaatcccaattaaacttatagatgtctgttgtaaactcatgaacaggtttagtggtatttatgttaggattcaaattgtgtgaattactttcaactgtgggctcttgattattcaaattattaaatttaaaaaaagagaatttaatagggatgaaaggaattaatcctgcaagaagagttagataccaaactttataatttaacatataattaaaatagcgttttaatatgtacctaaaaaataataacaataaaaatataaaacaaaagcttactatgctcattattaataacttagccatttcaacaccttctttcaaatatttataataaactattgacgagaatattacaattgtaatattattgatttatagaaattacaactgtaatattggagggtatattttgaaaaagttaatacttttaattgcaattgctttagttttaagtgcatgtaattcaaccagttcacatgctaaagagttaaataatttagaaaagaaatataatgctaatattggtgtctatgcattagatactaaaagtggtaaggaagtaaaatttaatgccgataagagatttgcctatgcttcaacttcaaaagcgataaatagtgctattttgttagaacaagtaccttataataagttaaataaaaaagtacatattaacaaagatgatatagttgcttattctcctattttagaaaaatatgtaggaaaagatatcactttaaaagaacttattgaggcttcaatgaagtatagtgataatacagcaaacaataaaattataaacgaaatcggtggaatcaaaaaaattaaaaaacgtttaaaaaaattgggagataaagtaacaaatccagttagatatgaaatagaattaaattactattcaccaaagagcaaaaaagatacttcaacgcctgctgctttcggcaagactttaaataaacttatcgcaaatggaaaattaagcaaaaaaaataaaaatttcttacttgatttaatgttaaataataaaaacggagacactttaattaaagatggtgttccaaaagactataaggttgctgataaaagtggtcaagcaataacatatgcttctagaaatgatgtagcttttatttatcctaagaaccaatctgaacctattattttagtcatttttacgaataaagacaataaaagtgataaacctaatgataaattgataagtgaaaccgccaagaatgtaataaacaaattttaatagtctaaatgtactacaaaaactgatataattctatctttcataaaacttcataatatcgaagaacatatatattatttataattatatatgttctatttttttatgttcacattttttaaaagagaaaatactattaacataccaaacatcatattccagttactataattataaatgctcgataatcttactcaacttttccatatagaaaataacttattttaaattaattaattaatcacattaaaaaattatataatccttgccaaaaaagaacatacgttctacaatgatgatgaggtggtaaacatgattccaaatcctaatgcgccagatgaatataaatatgaaactgattatagaaaaataccaagaaaatatttaaaccctaaaatccctcaagggcgtggaaaaatcaaatggcaagcttttgcgactctcccgcaacagtttgaaattttagaacaaattataaaggatcaaaataaaatagaaaaaccattgctaacacatgattcattagataatttagatcagatttttcaaataaaaattcaaaatgatgagttatgtacaatctcatattgggaagacggtaacatttcaaaatatacaggaaaaattttaaaaaaggatgaaattagtaatacattttccttttctgatactaacaataatatatataatttaaataatgctaacgtttgtagtatcacttaacactatttaaacttttaaaaagtttaaatagtgttcttataattacctttttcgaaatacttctagcaaaatcattataagtatcatactgatattaaatatattatttttatcactgaaaaaaatttctactacttggaaaattgataaaagacttattattaacaaaagtttatttaatttttcgcttctttcttcttccttatatgactgctccaattcaattagtaataattcttctttgtttaattcttcaatatattgtggagatttaaaatcattattattctttagatacaaatataaatataaactaggtaaaagctctgttctataaataattgcaatagatctcttgaaatttagtatccattgtctaaaatatagggcttctttttttccatttaaattatattgttgatacccatacaattgtaattcatttaacatagtttctaagaaaaagaaattagcagaactattgaaataaagtgccatttgagaacatttttctaaaacatctccttcttgctcatccatccaaactacaaaaacagatgctttattcaagaagtttatataattatcgctataaccatcttgcctaaaatgtttactttttccttcaaatgaaaaaataggcgcatttactaaccactcttgaatcttcacgtcctcatagaaaggatcatcagtaaattcattttcattagctaaataataaacttcaaaacccatatttttagatactttatattcaaaaatatccttactattaatttttataattctattaatttgtctagaaacatctctaatatttttacaatgtctattaccatacaattgatactgtctttgtctattatttttttcttgattaattagaggatatatcttatcttttacacatgagaaagtactatacaagtcgcttccaaagtttatactctctaagtcttcaatgatttctataacaaatgtaccattgttaaatatagttaaggttaaaaaaaataaattcaaagtgttctcatgagtaatttcaatatgtggagtgaatatatattttttatatttgtatccatgtatattattttgatcaaacaatccatcattaatatttgcattagtagcaaatttttctaaaaatttttctagtttttcgtgatattcttttgtatgtcttttatatcttccaggtaaaatccaataatcataatttaccggggggttgtcaggagataaaatgcgtataactccttttacattcaatagaatttcctcaattttttcaaaccaagggttcatgttattatcttttatatttatagcagtagcatattgatatgttactttatagccttgtaatttattaatatcttctagaatcttttcaattttattgtccattattttaaatatcctcatacagcctagaatataaaacgctaatttcttctttcaacatttttttctctttttctaaagaatttacttttctttttaaagaggagattaacgcatctttaccgtcatttttatttttatgaacaaatatttctctgttttgttcacgtaacttctctattttctttcgaattttattatttttatataatgtagctttcgaaacttttgaatgtttagaaacgatgttaaagttaatttctttatttttttgaactaaatcatttattgctttatcaacttttttctcggttttaacttttcgttctgcatgcaactgttttaattgttcttgtctattaaatttttccatcttaacctctatacttttattctattacttctcccgaatataatgtttccatcttttatattacctagtatttcttcatatttatttaatatatttatatgcttttcaaccatatcttgtctattattatttttagctaattctatagatttgaccgttgatttgatatgtaattcatatttttcaacatctaaatcagaaaatccaatagctaaatccttacatggtttcccagaattacaagtcaggcatggcggagcttccatgtatggacaatcaccactcaatctagcatgacaagtgccataaggattgtccattgcgtttaatttatgttcttgccataaagaattcaatgctttttcagatagttcactactatgctgtatatttttaattttaccgtcaacatcaaaactaaaagctccttgatcaataactgattcaaaagcctttctctttgtatcatcaagtaacttagcatatcttagagtcatttctggtgaggagtgtgctaataattcttgtatcgttaatatatctgctccaccatttaacaattttactgcataggtatgtctaaattgatgagttttgaaatggaagatttctccttgttcatcaataatatttttagtctttgataaatgatttaagtgtgctctgaccatatgttgtgtaaagggcattccctttctttttcctttataaatagcaaaaatataattattaggattattatcttttgtacttttacttttagaatcggctattaaaactgctattatatcagctaatttattatcaattggtattctatgtcctttaacaaaagttttagcaatatctgtgattattgaatactttccattaacttttgcaaggcaattattttgtaatgtcaatacatcagaaattcttaatcctgttttaaaagctatccaaactacaggtattaaatctttatgcaaatcatttatatgctcaaaaagctgttccaatacaaaatctgggatataatcaatttggctactatttttcttttcgtgtttaggtaagtcttgaggataaattaaaaatcgtatatcttggtacggtgctatagcatagttttgagttataatatcgtttaagaaccttctaattgtttttaattcttctctcacaaaattcttagtactttgcaaatttttattagctgcatattcaaacaaaaattctatatatgcttcgatatgacatctatctagttcatttaaactattccttgtttctttatttttagatatattttgaaaaaacctagttaaaactcttatataaaaccttgctgtagcaaatgctatatcaccagttatcaaacgattttttaaatatttttttgctaattctcgcattttaattgactcaattttttcaaagtttaaataattgccagttagtgttttattataactcaatccatatttttctaaatttctaatatcccatttatctttttcccattcttctcgcttatcaatgaacttaattagattaatgtacatattctttaaaaaagaagccagtccgcttttgtattcataatcaccaaaaactattgttgatgatcttctttttattggtatattattttcagtcagccaattaaaccagtgcttttctaatgtatttatatcacaatcaagtaaagaatttaaatttggataaacttcattaaagaacttagcaatcttattaagctttactgctccagtattaaataaattagataaggaccaatcctctttaacgatcagtttcaaaaaaaggtatttaaattctaaattcaaatttttacttttaatcctaaagaaaacattttttcttttgtctctatagttcttgatactatcttgaaattgcttgaatttgttaaaagctgtaatgtgccactcatcatttttaaaaaagtaatcatcatatatttcagttattaaaacctctccttttatattgatggttctactttgtaatgtacataattcattaatcatagtactgtttgtaggtaaattaattggtattgacatagtcattcccctttattaaaaacttgaaattgatgctttactttattccaatcttcacgtatatcttcttcagtgggatgaacatataaattaatagtcgtttgtatattactatgaccaagtctttcttgaacttgttttatatccttagtttcattataaaaaacagttgcatgtgtatggcgaaataaatgaggatgaacatttatagatgttttatgttttagccttttaaataatgaatatatatcactataattcatagcttctcctacatttctcccctttatttttacaaaaagataatcagaacatattgaaagttcgtcaattatttcgtagacataatcatcgtataaatcaattaacgattgggaaataaatatttttctttccccagttttcaaataagtaccattatcattaaatctatttttcaaaactatttgatggccttttctaaagtcaaatttaatatcatcaatacgtaatgataatacctcacctatacgtaatccggtttcatatagtaattgtattaagaatttatctctaatattattagcttcctctaataatttcttaacctccgcattagttaacacttctatttttttctttggttctttaactttcaaaatatttttcaacgttctatagtccttatttatgtgatgcatgaaacttttatattttttagagtatttactttccatatgcataaaatcatagaaattaacatctaattttttactcctatagagataatcataaaaattagatactacagtcatagtcagattaattgtcttaggactaatgcttttttcttttcggtgataagagaggacattctcatattcaaaaggtgttttcatccatcttataaaatcaacaaagttatcaaaactaacttctttatagcatatctttttactttctaagtaaacaaaaaaattttttagtgcataggcataggttttcttggtatttaaacttttcttaacactatccagatacttcaaatatcttactgcatctactataggttcattattaccatctaaaatcataaaattggtaccattcttagattttacttctactattttcataataatctcatttctaattttaatagtataagtatacactattcaaattctttttacatcatacatattaaacttattacacgtaataaaaaaagactatttaatatttttactttgttcattttttcttaaaatatgattcattttaaacaaaatagtctatattcttcaacatatatataaccttttgcaacattacccgaacaattcgaaacgattcaacaatacattatcgaccaaaacaaaattacacgtcctgtattatcagatgatcaattggctgagctaaacattcggctacacgaggcgctacaatatgcccaacctgtagaagttaaattttataataatggctttgtagattcagtacgcttaaccatttatcgtattgatgctattaattatgaaattgatggttatgtttacaatcagcaacaacgtcaaaaaatttctatctttgatatcttagatattgtcttgttaccttaatgctttgaacataattaaaggcaagaacaatcaatattgtccttgcctaaatgttattagttatttttactttcgatatcagaaataatttctttagtttttctttcaatatcttcaaaatcttttttaaagatataagcaaatgctactacaccaacaccagcaactaatgttgtaatagcaactaagctaaatacgaatttaaacacacatttaataaaattccacatctcaatttcacctctgttaaattaaatacctatctacatttcattatactatcatatatagaataatcattaaataaatacccacttttacgaaatatattcatcaaattatatagcgagcaagctaatgattattttcaaaaatgccgaggaacctctgtttcaacgtgacatgaccttatatgctaatgttaacaatgactattatcgtgaatgctaacttaagattgttatttatgataagatgattttaagtttttaacttaatatccccaccatctataaaaatatgttttaactgattgataagtcttatacaccgagaaatcacctcaaacaattttatatttcatttagtaaaatataactttatttaacatgacattcaatatacatacgattactatttatttacaatatattacaactaaaaagaaaggggccgatgatatgcaacaagtgacatcagatattatgacttttagaggttcacatttcgagttaggtgttaaaactggtaaatggcttcaacaaacacctcttctaaaaaatcgagaaaaagaatggaaaaaacgtgtcccacgtttcgatatagatgtaaatgaaacttatcaaatattccaaacttacgcacctcaaatatgggaagaattaatgggactacaaagtatactcaaaatgccaacacgccaaattattttaaactttggacattatcgttttaccgatttaaaagaaagtggttgcacggtctttcaaggcaaagacttcatggttagaaattacgattaccaccctgcaacttatgatggtcgctacttactatatcaacctacagatagcggtttagctcaaattggtcctgtatcaagggtaactggaagaatggatggtatgaatgagtcaggattaactatgggctataactttatgcaccggaagaaaccagcaaatggttttgtatgttatatgattggtcgtctaattcttgaaaattgccgaaatgtaaaagaagcaatccaattattgaaagaaataccacacagaagctcatttagctacatactgatggacaaatcattgaaccatgcaattgttgaagtgacgccgagatcaatagatgttcgttatgataatatatgtacaaatcattttgaaatattaacacatgaaaatcgcaattatacaaaagaatctaaagaaagactagcgcgtaccatttcacaaactaatgataatttagatatgactacagcatttaagttattcaacaatcctcagtatgaaatttacagtaaactattcaaaagctggtctggcaccatccatacatcaatgtatcaccctgaaacattaactgcatattttacattgggagaaaatgcgccaccagaaataatagatttcaaatcatggttagatggtcaagaccttaatatcactcactttactggcaatatagataccgacttaacttttgccaacaaataaataacaccgatattagagaaattatgcttcctaatatcggtgcttacatcctttatttattcaactttgatgttaccatcaatcgtataaaattctaaaacactatcgcttttcccaactttaccattaataaacgttttatttttaactacgctatcacccgttcccggatttagcttcagtatagtatcttcaggtttactatcatacttaaaacgaatatctccttgtttagtagaagcttttgcatctacttttgatggcatgtttttaaattcaatgtcaccatgatcgtttaaaaatatggattgtttaatttgactcttatcgatttgtagcataccaataacaactttaatattactatttttaatgttacttttactaatataagtaggactattatttgtctttgaatctagtgcgtcaagatttgagtttttaataactacttcaccgttaatgctttgaatacttgtgttctctaaatcaacatcactgattctaacacttcctgctccagacgatatatctaaacgtttaatcattttatcaggcatttcaatcgttaacgttttcttattctcatgaaaaggattcatatcaattgcatatcctcttgtcttagaccttttatcactaatcttcaacgtcttatctactatattaattaatatatcattgtcaccatcatatttaactctaaattgattcccccgctttatacgaagttctgtactatccaaatttatagatacattgtcaaaagcatcgtctttgaatgttttatcatattgtttagtaccatatttgtttttatcatagctgaaccaaataatggttgctgctgtaaaaaagacaacaaacactaaaagcccaataaaaaagaatttcttcattttctaacgcttcctttgacagttttaatataccaaagtaaatattttaagattaaacgataaatgtattctaaaatcttaaatatgacaatgataaatactaatcctaatcctgaatatgatatggcaaaaaatacattactaattgagtctacaattcctctggatattgctgatgctaataaaataattggacaaaacagcagcaaaagtgatattaaaaataatgctaatacaaataatccaactatagatactggtataaggatgacaaaaatagatagaatgcctaaacttaatgaagcagcaacagctcttgaaatattttcaaatgttggtttagattcagcataatcaataacacttctagcttttgtttcagctgcaacatcttgtgggtcttttaacttctttaaaatttcctcttcatcaacgccattaagttcttgctcataaaaataacgttcatattcatacattttttgatctcttaaatgcctaggtagcgcatcaagtgctgtttctaattcatttaaataagtaatcttgttcatataggtcactcatcccaataaaattattcattcgttttttataactttaagacctaaagctatttactaaaaaattcaatacgtttaatttctaaatcttgataaagtaagtttaattttaaatggttatctctatcaatatactttaccgatgagaaatcattgccaacttttgttcttttatatccgaatccaagattttcaatcgcgttatttatcggcgaaccaattcctccatcaaaattagtatgtatcttttcatctcttactaatattatccccttaacgatgttatccttttctctcactttaacggtaaggtcagggtgagctttactgttataaaatttaaaacgatcaaacttaatttttctatttacttcatagccttttttatcaaacttctcatttaatttaatatcgtttatttcaagattagacaaatccacagttttcgtatgacgatattgatataaaccaattaatacaccaaaagaacagattaaaaataatataaacacaacccagcgattttgaatacgcactgatgtcaccctttctttgtacttatttaaatatagcataaggtgcttcccgtttcatccttaacaaaaattaacaaagaatttgcaattaatttatttcattaccttttattactataaattggtataatgttgtaaatgctaaaggaggtttttacaatgacaaatttagaaacttatttcaaaaatagccaacccttaaatgaatacattgatggaatgaagacaaatcaagataccgttctcagtatctatcaatcatttgagttaccagaagatgattcacgcatcaaaaaaataaaagagatgaattattctaaagtattagtaattactgaagactggtgtggagatgcaatgatgaatctcccaattctaaaacacatcagtgaagcattaaatttagaagtgcgcgtgttccatagagatgatgatacaaaactgatcgatcaatatttaacaaatggtaaatcacgtgcaattcctatcttcgtattcttgaatgatcaattcgaacaagaaacagtttggggaccaagagcaaatgaagtccaaaaatttgtaactgatgttcgtgccgataaattaccgagcaaagatcatccagactatgcagatttagaaaaagaaacacacttagttatatcaaatcgctataaaactgacgcttcattttggaaagcagtttataattccatcctaaacaaattagaaaataaataaatttacaataagacaaactttgaggttgggaaaatttaaaattcccaacctcaaaattttttattaaatgtcttttttagcgacatataagatattcaaaatgaagaatatcactatagaacctaatgaaattacccattgccaattgctaaaatcaaagttagagctaatcattttatcagttaagtaagcaaaagggatataatcaaaagcatctaaaactttatcaccatatcttggaataaatgtaatgaatggtttaataaacggtactatgagtactaaaaatacacctaatgaaaatatcattgctgttttttgtgatgcaagtgtgattaagaataaaaacaagccaaagaatagtaaaaagattaggaagaaccataagttatctacatatttagaaaacgccaaattttttccattgctagatgcctgcacaacaatcaaaatcacataatgaattaatgcaaataatattgaaattaaaataattgaaattgttttcgaaataatgtatccaacacgtgttttaactttactcatatatagttggattgtgccttgtgaaaagtcacgcgtaattgtcttaacaacaaacattaaaccaattattaacaataaccattttgctgcagcaaatacagatccatagacaataatatgtttcgggttatccatcgaatttgccataagtatactttgcgttgcaatcaaactagatacgactagtatcgctaaatatgttaaaggacttttaaaaatactataaaaatcatacttaactaaatttaaaattctcattatttatcacctctttgatttatattgaagtacgtatcacgcaatgaacttttacgtgtttcaatatatttcggataaatatctaattcagataatgcttttagtataacttgataatttttttgtgcattgatcattaaatgtccatctgctttgtcgacattttgtaattggaaatgctctgcaagatatttttcagttctatcaaagtctttatgatcaacagtaactatcgttgtgtcagatgcaacaccttcctccatgtttacatcttgaacaaaatgtccgtctctcaaaaatacagctctatcacaaattaattcaatatcttctaatttatgacttgatattagaattctcatatcaagttcatttactagagacttaattgtagtcagcacatcaattgagccatctggatccataccatttgtaggctcatccaagattaaaaatttaggtttattcattaaagatactgcaattgctaacttttgcttcatccccattgaatatttcttaactttctttttaatataaggtctcataccaaatgcatctataattttgtctgtgtatgctttatcaaaacccttacctaatacttgtgcaaataatttcaagttatacaatcctgatttattatcatataatttaggatgctcaattaaaaaaccgatattatctgcattatcaatatctacttttccatcaaatttaataatattaccattcattactttcataacggttgttttaccaacaccgtttttccctattaatccgacaattctactatcgccaaagtcaaaatcaatatcatttaaaacgacatttgagccgtatttttttgtaatatgttctaatttcatcgactgcctcctttaaattttctagtatttattttattgagctgtttaaaataattaacaataagtataacaatgcttataattagaaaaccaatatttaaaatatatgaatatagatctgggaatgatgattgacttagaacaaaataattcaccaacactattgcaattgaaaataaaaatggaactaaaatgataatagtaaacacgtatataccatatggcactttgactctacgcaattctgtaaattgactaaatgcaattggtatagacaagaagttagatatggcaaatgcatatgcagttgaaaaatagattgaatttggttcaatcacatctgcttcataagcatataaactaataacaagcgttccaattaatgttaaaacaatgcatgtaatatagttggcattaagcaattgtttttttgacacaggtaaactcatataaaaataatatgaatcattaccacctaatctacgattgagtctaaataagtgaccagcatctaaaatccaaataatcaatattgttggacttataaaagattgcaataggtaaaagaactttgttgagtcaagcattatataaataggatataaggttaataatagaacatagatgataagtgtatatcgtcgtaatttaaaattcctaattaacaatgccttcatttaaaaaccttcttccatcaatttgatgttttcatggtatttaggttttctcttttcaagataaaccattaagttctcaatagaaggtgtagtgatattcactttatgacctaaaatttctttaaatacttgtgcatgttctgttaatcctataaatcccgtacgcttatgttcttcgtaaatcagcaaagcagccaattcttcatctaaatcttcgagggctccactcacaacttgatatctttgtaacagttgttcttttgaaccatttaagataacttcaccgtcacttaagtgaatgatataatcagctattttttctaaatctgagataatgtgtgtcgacatgaatattgttttattttcatcaattaattcttgctgaattatctccaatagttcatttctagctaagggatcaagacctgaagtaggctcatcaaaaatatacaattcagcatgatgtgaaaatgcaactgctaatgataatttcattttcatgccagtcgaaaatgtttttattgatttattgattggtaaatcgaacttttcaagataaaattcaaatacttgatggtcccatttacgataaaaaggggcaatcattttttcaagttgcttcgtagtccatctctcattaaaataattttcagcgtaaacaaacccaattctattctttaacgctatcggattgagatccatatcctcttctaatactctaataacgccactttgtggttgatacaaatccataattaaccttattattgtggttttaccagcgccatttctaccaataaaaccagtgacgaatccttgaggaactttgaaagagatattctttaaattaaactgatcacttgaataattaacattacttaattctatggcattcatgatgattcctcctcataaatgaacgttaaaatatcttgaagttcctcaagtgacatttcgatggcttgcgcttcattaaccaattctttaaccaaattttcaatggtaaaaaattgtttctcttttaaaatagaactatcttgctccttaacaaaggtcccttttcctctaattgtggtaacaaacccatctttctctaaatcttcataagcacgtttggtagtaattaaacttacttgaagatctttggcaagttccctcattgatggcaaatgctctccaggagcaacatgtccctttaaaatattttgttttacttgttgcttaatctgttcataaatcggaaaatcactattgttttttaaaattattttcatcaacgtccccctatcaccttctgtatatatacaatatacacaatatacacagttttgtaaatatgcatgtttcattatcaaccagtcttcagaaataacactgggtattgtattactagcagttgaataaaatgaaatgactctaccatttaatcttgcattgtctacttcaataaaaaagactgtctaaacgaatattcttatactttaacggtgattgtcgcgtcattaagaacagtcgtttaaaacagtcaattctatttgttatttttacgccgatcattacttctacttataaaagcacaaatcataaacataattgctgccaataatagttttataccttggctctcatggtttgttgcttgtaaataataaccaacaataaataaaataattgctaatgctacaaatatttttgttagatgtttcaatttatttcacctcaacatcgacattataacaaatataaagatttatcataacttaatatattgtatagtgtaatataaccaatctctcattggcttacatgacaacaaaactattcattcaaaatgattattgattgcgatatattgtgttcaatgatattatttaagtgtatccacagaattatactacacaaccccaagtctggtaccagcagacttggggttatttatgtgtgtaggatcattttttatttttccatttcagttctaaccaaagccgaaaaataattagtaacccacctgtaataagtgtcatcatcccttcttgccaccacatcattacactacacctccgttcgactaaagtatcatactgaaggatgacctacacctattctaacacaaaaacagaacgtgtgttcgtattttggtagcggattttacatattattcgttaattcaccaacaacactttatctttggtataattgaagataatatataggcatacaatttttttaaagagaggttaagcaattatgaatcctttagcccaaagcttaaatgaacaacttcaacagtcaaatgcaactgcctttgcaatgttatctgacttaggtcaaaatatgttttatccaaagggcattttatcccaatctgctgaagcaaagagtacaacatataatgcaactataggtatggcgacaaataaagacggaaaaatgtttgcatcatctttagatgcaatgtttaatgatttaactccagatgaaatattctcttatgcgccaccacaaggcatcgaagaattacgtgatttatggcaacaaaaaatgttgcgtgacaatccagagctatcaatcgacaacatgtcacgaccaattgttacgaatgcattaacacatggtttatctctagttggcgatttatttgtaaatcaagatgacactatcttgttaccagagcataattggggtaattacaaacttgttttcaatacgagaaatggtgcaaaccttcaaacatatcctatctttgataaagacgggcattatactactgattcactagtagaagctttacaatcatacaataaagataaagtcattatgattttaaattatcctaataatccgacaggttacacacctacgcataaagaagtgactaccatcgtcgaagcaattaaagcattagctaataaaggtacaaaagttatagctgttgtggatgatgcatactatggtttattctatgaagatgtgtatactcaatcattatttactgcattaactaatttacattcaaatgcaatattacctattcgtttagatggggcaacaaaagaattttttgcatggggattccgtgttggatttatgacatttggaacgtctgatcaaacaactaaagaagttttagaagccaaagtaaaaggtcttatacgaagcaacatttctagtggaccgcttccaacacaaagcgctgttaagcatgtattaaaaaataataaacaattcgataaagaaatcgaacaaaatattcaaacattaaaagaacgctatgaagtcactaaggaagttgtctatgctgatcaatatcattcacattggcaagcatatgactttaactctggatactttatggcaataaaagttcatgatgttgaccctgaagaacttcgtaaacatttaattgaaaaatattcaattggtgttattgcactaaatgcaacagatattcgtattgcgtttagttgtgtagaaaaagaagatatcccacatgtcttcgattcaattgctaaagcaattgatgacttaagataattaatttcaaccaataatctgatgagtatgacttggattattggttttttatttttaaaattattccttctttcaaagcatcataagatatattttattcagcaacttgtcaatcgctatacctaattagttttatacatctctcctaacataacttgatatgccttagataaatttatcaaacgtgtggcaaatcgcttcaagtatcacatctctacaaatgtaaaaggcaccccactattgtgagatgccttaatctaaaattaaagattaaaatttaatttcaatgtctacttttttaatgtcagttgctttaaatacttttgaatcttgtttcgcagcttttaagtcaacaaattttgatgatccgtctttaaaatacactttatacacagtgcgttcagaaagtccaatatcatgtttagtaataccttgatcgcttgctaacgctagtctaagtttagcattcaagtcgtttgttgttattttatgtggatgtaaaaacgcaaattcatttgaaactacatttgaaaatccattgattgttactggaaacttcactttagtcgctatgttagccactttattaagcgctttattagatttagtgtgttgttttacatcaatatctatctttttaatatctttgacactgaataagtttcttgtaaggatatctgatttaaggtcaacaacttgtgtctttccatttttaaagtgtacagtatacttcgcttgtttcgcaaatttcaattcaatatcattgatacctctatcatgttttaaaactgatttaacttttttatttaaatcttgataaccaattaattgtttattcgaaagttttagttttgatgcaataggtgttgatgtaccatttactgcgattgtgtatggtacatagctatccgctttcgcttttgaccctgttttaacatcgacatctatctttttaatatctttgacaaaaagcaaattcagttggctaatttttgagtttaaattaatcacttttttcgttccatttttaaaatgtactgtataagttgcttttttagcgtattttaattcacgttcaccgatacctctatcatgtttcaatactgatttaacttttttagtgatatcactgtagcttacacgtgagtcacctttaaattttaaatcagataaatttggtgttgatgtaccatttactgcaattgagtatggtacataacgctctgctttcgcttttgatcctgttttaactgtaacttcaattttcttaatatctttcgcatgaactaaattagctgtataaatattcgagtttaaatgtatcactcttttaccaccatttttaaagtaaacagtgtaatacgctttctttgcgtgtttcaaatcacgttcactaacgcctctgtcagatttcaatactgatttaacctttgctgttaaatttttgtaatttgtccaaggtttatttgaaaatgctaaattagattgaatattagttgttgtaccatttaaattaattgaatatggcacttgattatttgcttttgcttctttatctttcgcttgctttttagtttctacatttatattgatatttttaatatcgcctgtattgattaagttcgctgtataaatgcctgctttcaaatcgataacttttttcgtgccatttttaaaattaactgtaaatttcgcttgttttgaaagtcttaaatctacatcagttatacctctgtttgattttaaaactgattttacattattctctaaatctttataactaatttgttgattctttttaaatgttaagtttgataaaatgttttggcttgtaccattcacagtgattgtatacggcacttgaacatttgcttttgcctctttatctttcacttgctttttagaatctacgttaacactaattgctttaatgtcacttgtattgattaagtcagcagtgtgaatgcctgctttcaaatcgacaactctttttgttccattcttaaaatgaaccgtgtattttgcttgcttcgatagtcttaaatcgatatcactaatacctctattaaagtataaaaccgatttaactttattctctatatctttataactaatttgttgattcttattaaatgttaagcttgataaaatgttttggcttgtaccattcacagtgattgtatatggaatctgtattttagaatatccatgatgtaatgaacttgatgatttatctatttgcttagctgcggcagatgcttcgttagtattaaagtttgctcctgttgatgctaaaacacctaatgctaatgttgttgtaatcaatgacttaaatttcataaattatctctccttttttatgtaattcgtgattgcaacttaattatagccagactttctctattttttgaattaactgaatattaataataaattatctttaacaataattttttaacactgttaaaagttcttttaattttgattaactaattaatttacaatacctaaaatgttgtttgattttgtttataccaagctttaaacttaaatgtcattacaaccttcatttcttaattccgattacatttgtcaattatatttatagcatctttatactcaaaaaacatttactcaaaaatataaattcgatttaataattaatttaaatttagttaatcaattttgcatctattttgttgtaagctatataaaaggagtgataatgatggtgaaaaaaacaaaatccaacacactaaaaaaagctgcaacacttgcattagcaaatttattattaattggggcactgacagacaatagtgccaaagccgaatctaagaaagatgatactgatttgaagttagtcagtcataacgtttatatgttatcgaccgtgttgtatccgaattggggtcaatataagcgtgctgatttaattggacaatcttcttacatcaaaaataatgatgtcgtcatatttaatgaagcatttgataatggtgcatcagacaaattattaagtaatgttaaaaaagaatatccgtaccaaacacctgtccttggtcgttctcaatcaggttgggataaaacagaaggtagctactcatcaactgttgctgaagatggcggcgtagcgattgtaagtaaatatcctattaaagaaaaaatccaacatgttttcaaaagcggttgtggatttgacaatgacagtaataaaggctttgtttatacaaagatagagaaaaatggtaagaacgttcacgttattggtacacatacacaatctgaagattcacgttgtggtgctggacatgatcgaaaaattagagctgaacaaatgaaagaaatcagtgactttgttaaaaagaaaaatatcccaaaagatgaaacggtatatatcggtggcgacttgaatgttaataaaggtactccagagttcaaagatatgcttaaaaacttgaatgtaaatgatgttctatatgcaggacataatagcacatgggaccctcaatcaaattcaattgcgaaatataattatcctaatggtaaaccagaacatttagactatatatttacagataaagatcataaacaaccaaaacaattagtcaatgaagttgtgactgaaaaacctaagccatgggatgtatatgcgttcccatattactacgtttacaatgatttttcagatcattacccaatcaaagcctatagtaaatagtgctcaactaactaataactcgcttcgttctaaaaagtcgaagcgagtttttattgttaaaatataaaatgactagctttaaactgacatcccattgttttcatttctttaacttccactatacctctacatgcctcatatgcacctaacaatatcaagttaggttatccataataaaagatacagtgtctcaagctatctatcccaaaacaaataaaaagttacctactacgtgatacgcagcaggcaacttgcgaaaacttatttctgttctttatcattaagtacttttataaacctcacgttgtgtgtcttccaatcaacttcatataacgctgataatttttcttcttttttatctacatggttttcaccagaccaatagccccagaaaccatgtttgttccaatctattttaaactcatccattgatcgtttataatgtacaacaaattttgatttaccttcatcttttttatcgtgtgacattacagctaaaaattctggattaaatccttctgacacagtgacaggcattttatctttaggtgtgaaattatctttcgcccataagtttccgtttcgagttaatgaaaagatttcacttttcactctatcatcactgtcattagttaattgtctcgtatgatcatgtcccatattattgatagaatgtgcttctactttccaacctacacctttattagacgtagattggtcgagtaatgtacgatatgaaggttgttgataactaatcgactctgaataattactctctttcgtaatatttccagttaaaccgccacgattaattgaaaaatctccgcctgttttatagccatacgtatatttgacttcccttgattcatcttgatttttaggcgcaaagtcagtcacatttgtattgttattatcatcaacgttttgaatagagactgaataagagccaggccatcttaatgtactattccaatagccatttggttctaaaattctcaaaccacttccaattgtacctttcgctttaataaatactgtctctttatcgtaatttggttcagtaagaaaattaaattgtaaactttgagtaatatttttttgactatcacttgttgtagcagtacgtgtatacatttttgtttcgccatcaagattcttctcagatacttgtttaatttcagaattaatttttgcataagaagatgctgggaatacagttaaagctgttgatagtgctaaactacatgcagtaatatttttacatacttgtttaatcatttgtcatccgtcccttctattttaaccttctttgtatggtttgttttcatcagagtatttatcaataactttaactgttttatttttccaatcaacttcataagtaacaattaatctttgaccatctttatttttttctaaaattggtggtgcataatgtataccaggtttgtttttcaaaacatcttgatttcgtgtatatgtaacttcaaattgcgttttctcatttgacttttcattagataaataagttaaaaattctggattaaaaccacttcgtacaagtgcaggatatctgtattttgatgcaaaactcaattcaggattttctacagtagataatctagtatttctatagaataagaaatcatcatttctatttttcacttctccaccgtacttcaagtcattcgcaacaaccgaccagtgtacatgccagttattatttttaccgctcgcaattgtgtcgtaattttgttggttataactaatcgtttttgaatagctatttgatgatgttcgtccaaccccttttaccgagtcgaatttaccacctgagttatatgaaaatgtactgtctactttcgcagttgaaattttattttttggcagttgatctaaaatttcagttttacgattacttttcacttgaaaatctacatgatactcacttggatactttagccaacttgaattattttcttctttatgagattcaaactttaaatttgaatgaattgacccttgttttttgacaagtaagacattcttgtcatatgttggatcatcgataaagtcgaattgtaaattttggagtatatttgttttctcatcatatactgtttcagtacgctttgtaactttaccgtttttaccaatgtcatcaggtcctggtgtatttttatctttatcattcacattacgcttttctttttgttgagccttatcaacatgttctttcttagtttggtcttgtgagtctttattcgctgaattcgcttctgtatttgctgctgataacaataaaagtgcacatgataatgatgacgcaatgaatacgcgctttttatttttcattgttataaccttctttcttatatttaatattgttgataggtatcgacatgtgaataatatcacaaaaactaagaatatatatttaactatttattaaatgattttgtttatattattaaatacttttttcgatataaaattaatgtgtgtacaaagtgattaaattagtaaatcgcattatttagtagttaatcaccatggatctatatgttatacatgcttaaactaaatttttttcatacaatccgactggacgattcacaatgaaaaaaacacttactatcagtgattattagactactgatacaaggtgcatattttaagatgtaatcatgaacatagcacgtcactttgttacttaaaattaatgtttaaatacaataattatgtttatataaatatatatactactttgaaaaggtgtgagcttaatgacaacttttagtgaaaaagaaaaaattcaattactagcagatattgttgaactacaaactgaaaataataatgaaatagacgtttgtaattatttaaaagatttattcgacaagtacgatattaaatctgaaattttgaaagttaatgaacaccgcgccaatttcgttgcagaaatcggtagtggctctcccatacttgcattgagcggtcatatggatgttgttgatgcaggaaatcaagataattggacttatcccccttttcaactcacagaaaaagatgacaaattatatggtcgaggcacaacagatatgaaaggcggtctgatggctttggtcatcgcactcattgaattaaaagaacaaaaccaattacctcaaggaaccattagattactcgctactgctggtgaagagaaagaacaagaaggcgccaaattattagcagataaaggctatttagatgatgttgatggtctaatgattgctgaaccaactggatctggaatttattatgcacataaagggtctatgtcatgtaaagtaactgcaactggtaaagctgtccatagctcagttccatttattggtgacaatgcaattgatacactgcttgaattttataatcaatttaaagaaaaatatgcagagcttaaaaaaaatgatactaaacatgagttagatgttgctcccatgttcaaatcattgataggaaaagatatttctgaagaggatgcaaattatgcatctggtcttacagctgtatgttcgattataaatggcggtaaacaatttaactctgtcccagatgaagcttcacttgaatttaacgtaagaccagttcctgagtatgataacgactttatagaatcgtttttccaaaatatcattaataatgtggatagcaataagctttcactcgatattccaagtaaccatcgacctgtaacaagcgataaaaatagcaaattaattactacgattaaagatgtagcttctagttatgtagacaaagacgatatatttgtttcggcgcttgtaggtgcaacggatgcttccagcttcttaggagataataaggacaatgttgatttagccatttttggaccaggtaatccattaatggcacatcaaatcgatgaatatattgaaaaagatatgtatctgaaatatattgatattttcaaagaggcttccattcaatatttaaaggagaaataagaggtatactgtcagctgccctattcgcgtgctggcagttttttattgcgaattttaagttgatagaaatagcgatgaatattgtttaaatataaatgaactacaaggattaagaacgatttgatcaattaagtgatgtaaaattaaaactatagtgttgatttatcatacataaattgcattgtctgttgaaattgggaatccaatttctctttgttgggccccaccccaacttacattgtttgtagaatttcttttcgaaattctctgtgttggggcccctgactagaattgaaaagtaatacacatcagtaacatttctattttcatttatgatattatctaattattaatttataatataaaggagtatgcaattaaaatgaacaaagtccacaaacctttatatttttatttaatgctattcttctctacaactatcataggtgctcttttattgtatttacctttcactggtaaaaagccaatatcatttttagatgccctatttatagcttcaagtgcatttacagttactggcttgtccccagttgatataggatcacagtttaatatacttggtgaaatagtaatactattattaattcaaataggtggtctgggtatcgtgaccgtaaccctattgacactagtatttttaaatagaaagatatcaatgaaaaatagattcttgattatggttacatggaatattgacgaacctggtggtgttattaagctaattaaacacttggctatttatagtttagtcactgaattaattggtatgatttgtttgtgtttatcttttataccaaaatttggtataggcaaaggattatttttaagcttattcacatcagtatcagcttttaataatgctggatttgccctttttaagaataacttaatagattattctaatgatccaattgtcattatcacaatctcaatactcataatatttggaggtattggacattttgtcgtaatagactttattaattgtaaaaaattgagtaaattatctttacattctaaattagtcttaactacaactagtatcctaataattataggagctattacattctttttattagaacagtttaatactatgcaaaatatgggactagttgaaaaaatcggaaattcttttttccaatcagtaacaacacgaacagcgggttttaacagtattgatatagcaagcattaacaaatctaccgccttaatgttaatgctactaatgtttattggtggtgcccctctcagtgcagctggaggaattaaaataactacttttgcagtagcgtttatttttgtactaaattatatacgtaaagaaaataatgttttcgtattcaataaagaaatatctaacaaacatataaaactatctattgttaccattaatatctcatttctatttatcagtatcattacttttatattatcgataattaatccgaacatatcattaatcaagttattattcgaagtggtttctgcatttggaacagtcgggttaagtatgaaccttaccacagaatatcatggtattactaaaataattattatattcgttatgctttgcggtaaagtaggactattaactttattaagaacatttataccaccaaaaagtccaaaaaattaccgctacactaaaggacaaatttatctataaagtagctatcaatctttaataagaaatgaactagtgttttaatcttttacatttaaaaaactacctaaacaggtagttttttatttattctgcatttattttaggcccattaaatgtcttatctctttaaaaaagcaaatgcataagtacacctttaaaaagatctactcaaaactaaactatacaatgatttaaatatttaaaacttattttttactacgttaacctcaattgttgaaaagatgaatggaaatgataatttaataatgtatacttttgattgtttaaacatgtacattttctaaaattctagagataaatacggattttgaagttactactctttcatatttacaaaactgaataattgttatgatgaacttaaacatgaaaataagcaaaagtgaaatagctagacacatgggtgttgatagaagagcagttgataaatattcaaatgtctttgacctttattttataaattcttccataaaaataaccacactcctaaatcaataggtgggtgtggttttgtgccttatattttaagaatagccatcttcaaattattttcacttgtatgatctttgatttctgtaaatccaaattttctataaaattctcttaatctatcaacatcttcatactctatccaaatatatgaaccgccaaatatgctcgcaccttctaaaactttctcatatgctaaagttaacaaatcgtttccatttatggattttgtagccaatgcttcttcagaataattttttcctatttgagcaattaagtatccttgtatgattaaattgtcatttccactgtgagtttcacccttttgatataacttcttctttaacgtgtttgatattttatctaacatacgttttgtaaaaactaagggtttattgctaattgtaaaatagccaactagtatttgtttgcttttgaattgtgaaaaaactaaatgagttctagacaggttttgtctatcaaatgctatagacttatttttcaaaaataaatcaacatcgtgcgctgattcacttcctgaaattgatattatctcaaatgaatttactatatttaaaactgaaggtatctttcgcttaacctcttgcttatcacctgttaacaattctgaaagtgatattacttttacagtcaattacttcgatagtccttcaatagattttcaacctcacaagttgattttattttagtcgcttttatgtttgttttgttcacattactattattttcgttaatctccattgcatctattagtttttgcgctgatttttttgtgaatttataatcagtagtaatacttattgtagccatactactcacttccttattttacttcatttgacaaccaagtatacattgtctacgttgtcttcttgtttacaatgtatcatgaaagcatcttttcgacaatagattcaataaatttctttagtgtatatgattttgcacttaaaccaatttgattcttagcataaaaacacccatgctgtaactagtgtgggtgttttcaaaatgcagacagcttcttactacaatacgcaagtgagtcctctgcaaagccgaattgattaccggaaatctaattacattacaacatactagaagaaactccttatatactcaaaaggtatactaaacttctctatataatctatatgattttaacattgaaaaaacccccattatgaatctaaataacacatcagcacataataaagacgccttccaaaagttttggtaactaatggaaaacgtcttaaaaacatattttcatacgctctaatatttatttagaacgaatcacactcgtctatcatggaatgttctagttagtcaaaactataaacagttttacatcattcctggcatgccacccatgttaggttggtcattatttttttcaggaattgaagccactactgcttcagtagttaagaacattgctgcaacacttgctgcatgttgtaatgctgagcgtgttactttagttggatcaacgatacctgcttctaacatattaacccactcgtttgtagcagcgttaaaaccaacacctggttctgcatttttcaagcgttcaacgatgacagagccttctaaccctgcattttcagcaatttggcgaactggtgcagttaatgctttaagtacaatattcacacctgtttcaatgtcgccttcagcttcaatttcacttactttttggtaaacatttactagtgcagtaccaccacctgcaacaataccttcttcaactgctgcacgtgtagagtttaaagcatcttcaatacgtaatttacgttctttaagttctgtttcacttgctgcacctaccttgataactgcaacaccgcctgctaatttagctaagcgctcttgtaatttttcacgatcaaagtcagattcagtttcttcaatttgagatttcaattggcttacgcgtgcatcaatgctgttttcgtcaccgtcaccatcaacaacagttgtattatctttagttacttctactttacttgcagtacctaacatatctattgatgcgtcttttaaatctaagcctaaatcatcagtaatcacttgcgcaccagttaaaatagctaaatcttcaagcatcgcttttctacgatcaccaaaaccaggtgcttttacagcaacagctgtaaatgtaccacgcatgcggtttagtacgatatttgttaatgcatcgccttcaacttcatcagctacaattaagattggacgattagattgaaccacttgttctaataaaggtaagatatcttggaaagaagagatttttttatctgttactaaaatatatgggcgttctaattcagcaaccattttatctgaatcagtaaccatatacggtgattgataaccacgatcaaattgcataccttcaaccacttcaagttcagtgttcaagccatttgattcttcaattgtaatgacaccatcgttacctactttttccatagcttctgaaatatagcgtccaatttcttcatctgctgctgaaatcgcacctacttgcgcaatttcatttttattttcaactttttgagaattttcatgtaacgcttcaacagcaactttaactgctttgtcgataccttgtcgtaaaccaactgggttcgcaccacttgtaacatttttcaagccttcttgaatcattgcttgagctaatactgttgcagttgtcgtaccgtcaccagcaatttcatttgtcttatttgcgacttcttgaactagtttagcccccatattttcatatggatcttctaattcgatttctttagcaatcgttacaccatcgttcgtaattaaaggtgctgtaaactctttatctaatacaacattacgtcctttaggaccaatcgttactttaactgcatttgctaattggtcaacaccacgtaacattgcttgacgtgcatcttcagagaatttcaattgtttaaccataaatgataaacctccatttgtttagtcatatttcattttcgttctttacaatctatctatgaattatattctatattattcaattaccgctaaaatatcttcttcatttaaaactaaataagtctcattatctcgtttaacttctgtacctgcatattgttggaacacgacacggtccccttctttcacttcaggagtcactcttgtaccatcatttaataggcgtcctgttcctactgcaacgataacgccttcgtttgatttttctttagcactatcagttaaaacaataccacttttagttgtttgttcttgttcttttttctcaataatcacacgatttccaattggttttagcatgattgttcctccttaaaaaacctaaagtttagcacttaactttatagagtgctaacatacatttataataatcaaatttggtcaaaacttcaagtcataacctttcaattaagttttgtaacttcaagttatttacgataaaataaattataaacaaatatttggaggaaaattatgacaagactatgggcatcattgctaactgttattatttatatattgtctcaatttttaccgcttctcattgtaaaaaaattaccatttgtacaatatagtggcatagaactgactaaagcagtcatttacatacaacttgttctatttttaatcgccgccacgacgattattttaattaatttaaaaattaaaaatccaacaaaattagaattagaagttaaagaacctaaaaaatatatcattccatgggcattgcttggatttgcactggtaatgatttatcaaatggtagttagtattgtatatactcaaatttttggcacacaacaaacaagtccaaatactgagcgtttaatcgttattgcacgaaagattccattgtttatctttttcgtatcaatcgttggtcctctattagaagaatatgtatttagaaaagtaatctttggcgaattatttaatgcaattaaaggtaaccgtatcgtcgcatttgctattgcaacgactgtaagctcattaatctttgcattagcgcataatgactataaatttattcctatatactttggtatgggcgtcattttttcattagcatatgtatggacgaaacgacttgctgttccaattattattcatatgttacaaaatggatttgtcgttatattccaattacttaatcctgaagctttgaaaaaagccacggaacaagcgaattttatatatcacatttttattccataatataaaaaacgaatcacacacggattatcgtcgctgtgattcgtttttatttttctttttatttcgctttacaaataagaatagcatgattgaaaataccacaatcatagaacatacaattgctagccaacttttactatatgcagttgacgcacttttcttattatcttcttgttttttaactactgtaaaatcgtctttttcatgaggctcaaatgaacgttgttttgaatccggcttatcttcgggctttttcaaatctggcattgatccaatttcaccagtaattaatgcgagtacttgttcatctaaattacgatagtacctttctgatttcaatggattgaaatattggaatctaaagtaattcgattgctgttgtaatccatttaaatatgcatttccgctgaagttttgtttgcgaataatattataaatgtcttcatcagtaacttctccataatctttgcccaacttattaatttgatttaaaatatacggattatacttgtaagccccattcgccaaggctaaaaatcgttgggatacaaaatcattaccagtatgattttgtgagtttccttgatttccatttggttgccattgaccttgattagatccatctgaagcatttgggttccatgttcccccatttttcgagccaccagaatgattggaatccccaggttgattgggatttggagacggatttggatttggcttattagggtctggttttggattcggatttggatctggttttggatccggatttggcttcggtttgtctggatctggttttggatccggatttggtttcggcttatctgggtctggctttggttccggatttggctttggtttatctgggtctggctttggttccggatttggtttcggcttatctgggtctggcttcggattcggacctgggtttgggttatttgggtcaggttttgaatctggacttgggttttggttgtttgagtctggcttcacattattcgaatcaggattagcatcacgactattcgaaccagttccttcattaccagcttgatttgattcgtgaggtgtcccagtctcattattattcatttcactatttactgatggtgaagttacattatgattcaaattagtcgttggcttttctccatttaagttatcctttgcttcaactgtgtgcgttgcaagccctaaactactactacttaaaattaacatacttgttgaaagtaacattttcttaaaccaatcatatgacatttcacgagacacctccctttttcatataagtattaatctaagtataataaatatgcgttgaaaatgcatttatatttggaatttgaaaatgaatattaatattcttgaaattttcgtaaatattactttacaagttcgagtataaaatttatactaagtctattaagtattctttactaaagaaggagtaatgattatgggtttatttaaaaaagataaaaaagcaatgacttttgacaacgcaatggaagaaagacgttcaatatataatttgaaagattcaatatcaattagcgatgacgaattagaatcaatgattgcacatgcagttaaacatgttccttcatcatttaattctcaatcaactagaattgttctcttattaaatgacaacaataataaattttgggataacacaaaagcaattttaaaagaagtcatgggagagaatcgtgatttcgagccaactgaacaaaaaattgataacttcaaacattcatacggcacaattttgttttatgaagatcaagatgttgtaagtggtttacaagaacaaatgccaaactactatgataattttgcaatatggtcaactcaaacaaatgccatgcatcaatttgcaatttggactgcattagctactaaaggcataggtgcttcattacaacactataatccacttgttgatgagatgacttcaaatgaatttaatattcctaaaagttggaaacttattgctcaaatgccatttggtgatattcgtgaagctgctggcgaaaaaacatttaatccagtggaagatcgtttcgtaataaaaaaataatcaatatattgttgggaatgggacagaaatgatatagaatcattagttattcattatgtagtagttcttacacattagccgctgctaatgtgtacttaagaataggaatacatgagtaaaactcatgtataagaaatactaatttctaaagaaaaagtatttctttatgttagagcccaccccaacaactactgtcaatataacattgtagagcctaggactttgattttatgtcctgggcttgttttttgcgtttgaacataacttttagtaagttatatataagatctatcaaggatgtgatgttatgaaagtccaaatttatcaattaccgattatttttggagatagttctaaaaatgaaacccaaataacgcaatggttcgaaaaaaatatgaatgctgaagtagatgtagtcgttttacctgaaatgtggaataatggctatgatttagagcatttaaatgaaaaagcagataataatctaggacaaagtttttcatttattaaacatttagctgaaaaatataaagtcgatatcgtagctgggtcagtttctaacattagaaacaatcaaatatttaatacagcttttagtgtgaataaaggtggccagctgattaatgaatacgacaaagttcatttagttcctatgttaagagagcatgaatttttaaccgctggcgaaaacgtagctgaaccctttcaattgtctgacggtacttatgtgacccaacttatctgttatgatttacgttttccagaattattaagatatcctgctcgtagtggtgctaaaattgcattttatgtggcacaatggcctatgtcgcgtcttcaacattggcattctttactaaaggcacgtgcaattgaaaataatatgtttgttattggaactaatagcactggattcgatggtaacacagaatatgctggtcattcgatagttataaatccaaacggagatttagttggagaattaaatgaatccgcagatgttttgactgtagatttaaacttaaatgaagtagaacagcaacgcgaaaatatacctgtatttaaaagtattaaattagatttgtataaataaaaagcacacgaaataatatttaacacatgtcatgactaaacatagatttatgagacgatttttcataagcctatgtttatttttttataatagataactcagtaagaaccagtttcgcccatagcaaatgaatgtttttcttaattaaattgattatttttttgaccttttccaacattagacttattcatatattttaacggtggatctcataatgaggattaactcttccctactttattacaataaaaaaaggccgcgagcttgggaggggctcacgaccatacttattattaagggaatgttttacagttattttttcaatctatttttggggatgttattaattatgaaaaaaattttatttatcaaataatgataaatcgatgttgtttacgatagcttacatgctagaaataattatctgtaatgataattaagaaaaatacatagcactgagtccaaggaaactaactctactagcaaatgttactcacttgctaattttacatggttattaagttgggatggcttaataactcatacttttagtactatacgaagataacaaatttacaatgaaagtaattaattattcatcttattttttagtgaatttgttcactgtgtcgataatccattttactaagtcaccgattgttgaaatgatatcttgtgccattgaaatcactccttccttaattaagataaaaattcttaaaattaaacaactcatcaactattttccatcacatctctgtgatctagttatattaaaacatgctataagcatttattttccattttttcttaactagtcgttttttattcttaactgtaaatttttttatgttaaaatattaaatacaaattacatttaacagttaagtatttatttcctacagttaggcaatataatgataaaagattgtactaaatcgtataatgacagtgaggagagtggtgtaaaattgaattattttgataataaaattgaccagtttgccacgtatcttcaaaagagaaataacttagatcatattcaatttttgcaagtacgattagggatgcaggtcttagctaaaaatataggaaaactgattgttatgtatacgattgcctatattttaaacatttttctctttacgttaattacgaatttaacattttatttaataagaagacatgctcatggtgcccatgcaccttcttccttttggtgttatgtagaaagtattatattatttatacttttacctttagtaatagtaaattttcatattaactttttaattatgactattttgacgtttattgctattggtttgataattaaatatgctcctgcagcaactaaaaagaaacctattcccgttcgacttattaagcgaaaaaaatattacgcaattattgttagtttaatctttttcattatcacacttatcatcaaagaaccatttgcccaatttattcaattaggcatcataatagaagccattactttactacctattttctttattaaggaggacttaaaatgaatacattatttaatttattttttgattttattactgggattttaaaaaacattggtaacatcgcagcttatagtacatgcgacttcataatggatgaagttgaagtacctaaagaattaactcaattacacgaataataaaaatagaaagtgtgatagtaggtggaattattaaatagttataattttgttttattcgtattaactcaaatgatattaatgtttacaataccagctataattagtggtattaagtacagtaaacttgattattttttcattataggaatttcaacattatcgttatttctatttaaaatgtttgatagcgcgtccttaatcattttaacttcattcattattataatgtattttgtcaaaatcaaatggtattctattttgttgattatgacttcacagattattctgtactgtgctaactacatgtatatagttatatatgcatatatcaccaaaatttctgatagtatatttgtaatattccctagcttttttgtagtttatgtgactattagtatactattctcatatataataaatagagttctcaaaaaaattagcacaccatatctaatactaaacaaaggatttttaatagttatttcgactatcttactgcttactttttcattatttttcttttattcacaaataaactcggatgaagctaaagtaataaggcagtattcttttatttttattggtatcactatatttttaagtatattaacatttgttatttctcaatttctacttaaagagatgaaatataaacgtaatcaagaagaaattgaaacctattatgaatatacattgaagattgaagctatcaacaacgaaatgcgcaagttccgtcacgattatgtcaatatcttaacaacgctttcagaattcattcgagaagatgacatgcctggcctacgtgattatttcaataaaaatattgtacctatgaaagacaatttacaaatgaatgctataaaattaaatggtattgagaatcttaaagtacgtgagattaaaggcttaatcacagctaaaattttacgtgcacaagaaatgaatataccgattagtatcgaaataccagatgaagtaactcgcattaatttgaatatgatcgatttaagtcgcagtattggtattattcttgataacgcaatagaggcatcaagtgaaattgatgatcctatcattcgagttgcatttattgaaagcgaaaattcagtaacgtttattgttatgaataaatgtgcagatgatataccacgtattcatgaattgttccaagaaagtttttctactaaaggtgaaggtcgtggtttaggtctatcaactttaaaagaaattgctgataatgcagacaatgtcttattagatacaattatcgagaatggtttctttattcaaaaggttgaaattattaacaactagccataaggatgtgaatgtatgaaaattttcatttgcgaagacgatccaaaacaaagagaaaacatggttaccattattaaaaattatataatgatagaagaaaagcctatggaaattgccctcgcaactgataatccttatgaggtgcttgagcaagctaaaaatatgaatgacataggctgttactttttagatattcaactttcaactgatattaatggtatcaaattaggcagtgaaattcgtaagcatgacccagttggtaacattattttcgttacgagtcacagtgaacttacgtatttaacatttgtctacaaagttgcagcgatggattttatttttaaagatgatccagcagaattaagaactcgaattatagattgtttagaaactgcacatacacgcttacaattattatcaaaagataatagcgttgaaacgattgagttaaaacgtggcagtaattcagtgtatgttcaatatgatgatattatgttttttgaatcatcaacaaaatctcacagactcattgcccatttagataaccgtcaaattgaattttatggtaatttaaaagaactgagtcaattagatgatcgtttcttcagatgtcataatagctttgtcgtcaatcgtcataatatcgaatctattgattcgaaagagcgtattgtttattttaaaaataaagaacactgctatgcatcggtgagaaacgttaaaaaaatataataagataataaagtcagttaacggcgtattcaattgtaaatcttgttggattttaacaagataactagcaaatgcactgtatagctggctttttattttttaatagcaaaaatttaatttaaagcgtaaatttaaataaaacgatacaacgtttcattgtatacctattcctattactacataatttatcaattactatttcactctacaatcctatggcgcaatttttaacaaaatatactaaatttgaaatcgacagtttccttaaataaaatgctacaatatcctacccaatgaatcttattttgctcgcaaaaaaacagtgtagcacaagattcaacttgtttcctacactgttttataaatgaattatttaaaatacttgttcaacctcttgtaatgttggcaaactattaatagcaccatacttcgttgtcactattgcagcaacgcgattgctaaacgctaaaatttcctcaccttcattttcaaataactgaattaaatttaacacatcggttgctaaaatcctgctaataactgcaccaataaaggcatcccctgccccagttgtatcaacaggttttaccttatagccactatgataatgattaataccatttttcaaatatacggcagcaccatctgctcctttcgtataaatgactacagtgacattacctgtaaataatgattgaatggcttcattttcatcatgaatacctgtaataaattctaattcttcatctgaaacttttacaatatgagccaatggcaaaaaggtatgaatagtttgtcttaaatcttcagcgttatcccataatggcaatcttacattaggatcaaatacgacagtaccatttgcatttaatgttttggtaatcaattgataatgtgcatctctcatcggactatcgaccaaatcaacagaacaaaaatgtactacatcattttcattcacatcaatatcattcacaaaacttggttcaaataacatatctgcagagggcttacgataaaaagaaaaatctcgctctcccgcttcagtcaaactcacaaaagctaacgcagtgtttgcttcattcgtgcgatacacttttgatacatctacaccaatacttgaaatcgtttcaacaatgctatctccaaatgcatcattacctaattgtgtaatcatatgcgcttgttgtcctaacttttgaactgtacaagctacattgcatggcgcgccaccaatttgcttcgtaaatgtttgaacatcttttaaattcgcatttgtaatatttggaataaaatcaattaacgcttctcctattgaaaataaacgtctcatttatgttcatcctttaaatcatatttagtaaattgtaaatatacttgccctgattctgttgatgttttaatacctagtgcgtcttctgtcgggaaaattcgagatgtcaaaacacgttccccatcattacagaaaatttctatactagatgtatcaacaaaaatttgtaattgctttaatggcgtttctaatatcgtactacgcgtcgtaccttcaacatttgtaggcaataaaccactgtcgctgcgatctaatgttattttattttcacgcttgttataagcgattaatgttgaagaagtcttagacgtacgtaattcaaagtacacttcggtagcatcattatccaaaatatctatgattaattcatactgtttaccttcatacggatgtaattttcgagtaaatttatttgcgtagcctaatgctgtctctttattgtgacgtaatttttccaacgctggatatggacgttgcttaagttgaccattttctacatttaatacacgaggaattgttaagcaatgggcccatccttcattatcagtaggatattcgatttccggtaaccccatccatccaattagtactcgtcggcctttttcatctaaaaatgtttgaggtgcatagaaatcaaagccattatcaagctcgacaaaattttcatgttcatatgttaacttttcaatatcaaactttccaagtatataaccactttgataaatattgttgaactgatcgccttttggttcaataccttgtggacaaataagtatgacatcttgattatctacattaaagtaatctggacattcccacatatatccaaaatcatctaactctgtatttatttcacctaaataatgccaattaattatatcttcagtattaaaaagtaataatcgaccttgctgatcattattttgtgcgccaataatcgcataatatttctcaccatatttaaaaactttaggatctctaaaatgacttgtatatccttctggttgctggctaattactggctttggaaacttttcaactgaaccgtcttctttcaatcgtgcgatcatctgactcgcatggcgttgccaatgattatctcgatgatttcctgtgtacatataatataaatgcccattatattcaaaagcgctaccgctataaacaccatggctgtcatatttggtatctggatttaaaattggcccttcagctttaaagtttattaagtcatcactcgtgtagttataccaatactttaagccatgtactgcgcctaatgggaaccattgatgtgaaacataatactttcctttataaaaaataagtccgttgggatcgtttaataagcctgtttctggttgtatatgaaattgttgacgaaattttgattgatcaacttgttgttttaatgttttaaaataatcagtatcaacgtcttcgattcgttgataacgttcttctctagtccattcggtcataatatttacccagtcctccttttataatttatgctgttaacaatttatattctattatagcaaattttacctacgttctttaacttttaacctatccatttatatttttatggtatcggttccacattcattttaaaaaatacagcgtctaaatattaacatctactgtgacgctatatggcatatcttgctttttaagcatctgttgtatctcttccatcgcgcattggccagcttcaaaataattataatgaattgtttttatcgatggagacactaattgtgtcattgggtcaccaccaaaaccatatatttgatgtggtttcataacatcttttttatcagaataatatttataggcagctaatgcaatcgtatcagttgctccaacaaccgcatctacttgctctacattttccaaaacatttgcaacatctttttgtgcttccacataagtaaaatttgtttcatgtatattaggtttaatttgatatttggctaactggtcaagtaaaccacgttttctatgtataccaactgcaatatctttttcactcacactaaacacttcaacttgttgatatccctgttgaccaatccattcacctataatttgacctgctttataatcatcatgcacaatactatgcagttgttcatgttgttgaccaacaataacgattggtacattcattttattaatgacttcaatatgtctctctgttatgtctgtagccattaaaacaataccatctactttactgcgtgctaatgtttcaagcgcttgtatttctgcttcgatatttaaacctgtataatttaaaattaattgtgattcatatttttggcattgttttgccaatcctttgattgtttcatctactgcatatgaattcattctaggtataatggcaccaataaggtgtgtttgtctcgctcttaagctttgagcaaattgattcggttgatagtcatgttctgctataatttttgttaatttttcacttgtttttttactgacagatccattatttaaaaatctagatactgtactttttgaaacgcctgccaatttggcaatatcagatatatttttcatacttattcacctatcattatttgtgacacttagccttattttagcatatgtgtaaccgctttaaataatatttctgcttctttcataaaaagatttcaaaataaaatttctgtataacaaaatgtcccaacatcaacctttagttaaatgtcaggacaatgaatattctatgtatatataaatctaatatcgaatatgtttattgaatctatttagctcaccttcaaagtaagcatgttcaccatgaacaatcttgtctaatcctatattcgtttcttgttctgtaacagataatggtgtaattaatttaattacttttgcaataataaacgtcatgacgatgctaaaaattacaactgctgttacacataatatttgcacaagtataatatgcacgtcaccagtataaataaaaccattttcaatatctggatttgcttttttactttggaaaaaggctgttaatactgcaccaataataccgccaacaccgtggataccaaatgcatctaatgcatcatgatactttaattttacctttatgtaattgatgacaatataacaacagatacctcctattaaagccatgattgttgcactaagatatgttacatatccagctgcaggtgtaataacaactaatcctgctaatgcaccgagtaaaagtccaagtaaacttgtcgtctttttaaaaatatattctaaaattaaccaaccaatagccccggcactggcagaaataactgtattcgtaaatgcaagcattgcaattttatcaaatgtaaaagcactgccaacattaaatccataccaaccaatccacacgaatataccgcctatcaacgtaatgataagattatgtggtgttgattcagaatgtttgtttccttttccaatcattatagctaatactaaaccagaaacacctgatgtaatatgaacgactgtacctccagcgaaatctaatacaccgagtttgtttatccaaccgccgccccatacccaatgtgctactggactgtatacaagagcagtccatattactacaaataataaataaggaataaacttcattttctcagcgattgaacctgataatattgagattgcaatcgtacaaaacatcatttggaataacataaataatgccaatggaatatgcggactaatatcttcttgtgtcgcgaaacctacatgattaagaaatgtatattcccagttaccaaaccataaattcccttccccaaaactaattgtaaaaccaactgttatccatacaaatgtaacaagcacaattgctgccatactttgcatgacagtatttagcgcatttttagattgaactaacccaccataaaataaacttaatcctggtgtcattagccaaactaataatgtacacaaaaacataaatatcgtatcgttaagattcatacttaccactcccttgttttcataataatctgataatttataaaaagcaaaaatgcgtaaagttttattacatcttttggaacaaaatatgccacgctatataaaaaatgatttcatgaactaaaacaaaaaagactacttactcgcttttaaagtagcggaagtagtcctaaactctaatatctattttattgttaaaatgatatcgttaaactttttgaattgtaattgtccatgaagcattatcaatttgttcatagtttgttacaggatatccattttctgcagcccaatttggaatggcttccgtcgcttgcgtgcaatcaaaatcaatttttaattcatctccagattgcaatgttgccattttcttttgcgcttcaattaacggaaatggacataccattcctactgtacctaattcgtgtatcatagctatttctccttttccaatcacttttatttgatcaacatcattggcataataaccttctatactatttgcgtttgctgttggacctttgcagattgttgttgtacttttttcattggacgaacaaagataaaatgactcattgtccataccccaactatcatcgatgctagcgcaatccatccttgccaagtcatcgttgccgtttcaaccaaaccgttaccgatagaacaaccaccagcaactgacgcaccaaatcccatacatatgccaccaatagcactgtttcgtattgtaatcttgtctggcaatcgccatttaaattctcttgatcctctagctgcaatatatgaaccaatgaaaattcctagaactaaaaagacaccccaatcaataaatttagtttcacctgtaatcaaaaagtgtactaaatttgctgatggcgttgttatacctaaaccgtcatttcttccagttgatgcactcattggccaagctaagagtgcgataagtccaattgcaattgctgcaataaatggatggtatcgtttttcgaaaaggtaatatctaatacctgtataacgttgctttagttttggaacagcaactcgaactttcttattattgagcgttcttacaacgagaaaaatggtgattatagttaatataacgactaatccccaaaacggaatgcccgttgtttgagatatatcactatttacattcgttggttgattaattttatccattactggctttaaaatccctgttttagtgattgctgcagtaacagcatataatactaatgcaatccaactaccaattagcccttcaccagcgcgataccaagtacctgttgcacaccctccagccaatactattccaattccaaaaataaaagaacctataactgttcccaatattggaaaactatgtgcaggaatttgtaaaatacctgttgtcatcaaaatcaataatcctatactttgaacagtaatagcgattaataatgcatagaacattttattattcttttgcacatacatatctcgaaagccacctgttaaacaaaatcttgttctttgcatcacaaaacctaagagtcccccgacaattaagccactaaaaatcatccacatcgtcctaaccccctaatttccgataagtttagtatgtattataggcgatgattttcttgttttcaaccttatacacaatatttttgatatttatattatgttcatataagaaatgcgattaattacgattcatcattataactctacgtgttaatttattacctatattatatttatcaacacaacagttttccctttcattttcaaacataacagaaaaagcctgagacatacttagtcccagactgttctataattaattaaagatataacaaggttaatcattcaaagctaacatcacatttattcactgtaatttttcataaagaataataatgactgtaattctatacctaagtcaatttgatgtacttgcacatctgaaggcgtatttattctaccaggagtgaagtttaaaatacctttcacaccagcttggacgagttcatctgcaactttctgtgcaactctttctggtgtagttagaatcacaacatctatttcttccttcttcaatgttgttattaattcatcgttatcttttacaataacgttccctattttctggccaataacatcttcttttacgtcaaacgcttctgtaatcgtcatatcgtcatgtattgaaaagttatatgtgagcaaagctttccctaggttcccaactccgacaattgcgattttgatcatgtcactctcgcttagttcagatttaaagaaatccaataaactatctatattatatccgtacccttttttacctaattcgccaaaatatgaaaagtcacgacgaattgttgccgagtcaatttgtaacgcatcgctaatcgcttttgaatttacacgatctatacctttagattttaatgaactgacaaatctataatataacggcaaacgttttaaagttgctcgaggaattttaacttggtcactcattcgctatttcctccttcgtgtttgaatgaattatatctatgtattcaaacgagttagagcgtaattgttagattattaaaaaacaaataattgattacaatgaatacctaaatattatacattattgaattttaaaaataaatatcttagtttcaagacggcgttttatactgtaaaatggttattaatgtaataattacgacttttatcataagttaataaaatttgcgaaagacgaaaggtgaagatcgaatgatacttttacaactcaatcatatatcaaaatcgttcgatggtgaagatatatttactgatgttgattttgaagtaaaaactggtgaacgaattggtatcgtaggaagaaatggcgccggtaaatcaacattgatgaaaattatagctggcgtagaaaactatgattctggaaatgtgtcaaaaattaaaaacttaaaactaggttatttaactcaacaaatgactttaaattctaatgcaacagtttttgaagaaatgtcaaaaccatttgaacatattaaacgaatggaaagcttaatcaaagaagaaacagattggttatcaaaacatgcaaatgattacgacagtgatacatataaaacacatatgtcccgttatgaatctttatcgaatcaatttgaacaattagaaggatatcaatatgaaagtaaaattaaaacagtactccacgggttaaattttagtgaagaagatttcaataaacctatcaatgattttagcggtggtcaaaaaacacgtttatctttagctcaaatgctattaaatgaacctgatttattacttttagatgaacctactaaccacttagatttagaaacgacaaagtggcttgaagattatctacgttattttaaaggtgcaatcgtcatcatcagccatgatcgttactttttagataaaatagttactcaaatttatgatgtggctttgggtgatgtcaaacgctatgttggtaattacgaggaatttatacagcaacgggatttatattatcaaaaacgaatgcaagaatatgaaagtcaacaagcagaaataaaacgattagaaacttttgttgagaaaaatattacccgtgcttcaacaagcggaatggcaaaaagtagacgtaagattttagaaaaaatggaacgcattgataaaccaatgttagatgccaaaagtgcaaatattcaatttggctttgaccggaatacaggtaatgacgtcatgcatgtaaaaaatttagaaatcggttatcaaactgcaattaccaaacctatcagtatagaggtctctaaaggcgatcatatagcaatcattgggccaaatggtattggaaaatcgaccttaattaaaactattgcaaatcaacaaaaagcgcttaatggctatattacttttggcgcaaatttacaaattggttattatgatcaaaagcaagcagaatttaaatctagtaaaacaattttagattatgtgtgggatcaatatccgttaatgaatgaaaaagatattcgtgcagtacttggacgtttcttatttgtacaagacgatgttaaaaagataattaatgatttatctggtggtgaaaaagcacgtttacaactagcactacttatgttgcaacgtgacaatgtacttattttagatgaacctaccaaccacctcgatatagattcaaaagaaatgttagagcaagcactccaacattttgaaggaacaatactatttgtttcccatgatcgttactttattaaccaattagcaaacaaggtatttgatttaacaattgatggcggaaagatgtatttaggagattatcaatattacattgaaaaagttgaggaagcggaagcgttgaaagcgcaccaagaagaacagtcagttaacgtacaagcacatgaaaagtccatggaacaatcgtcgtatcataaccaaaaagaacaaagacgtgaacaacgcaaacttgaacgacaaatatccgagtgtgaaaatgaaatagaaactttagagactactatcttacaaatagacgagcaattaacccaaccagaagtttataacaatccacaaaaagcaaacgaattagctatccaaaaacaagatagcgaacaaaaattagaacacgctatgtctaaatgggaagaattacaacaaaaactataaaaatatacataactctaactgtaaaatcgctatagttagagttatttttttacaaattttaaatttttttattcacaataaaaacgctgatattatagctatccacagagttatcctagttatccacaagtaaattaacactaatcaatcatttattttctgttttcccacctgatatccacagtaaataacgtcatcaacaccttttatccacaagttatacactctttgttgataagtacgcatgttctctattgacattgtttttatcaaaatccattgttaatacattttctttatgaaataataataatattgaagtatatttttattattattcaaaataaataaggagatagttatgagcacaaatcaaacatttttaatatttgttatagcaattattatacttacatcggtaataggaattgttggacgatacatgagtcgtcaacgtctattaaaatctatggtaacattatggcaaacgatttctccattagagtcttttatcagaccgaactcacatttcgactatgagtataagctctacaaggataaatttgaatcacattctttagttgatgataaaacttggtccgatttaaatatgaatgctatctttcataagatgaattataatttaacagctattggcgaaatgaaactatatgcctgtttacgtggaatgctttcaattacaaacaaatcattacttagtttatttaatgataatgctgaatttagaaaaaacgtaacatatcatttagctttgattggtaaaactgtttatccaacatttccagaccaaatcacaccggtaaaacgtcataatatattgtttctatgcccgtttttaccagttatctcatttgcagttatatttattaattcacaagttggtattttattatttcttatgagttgcctatttaatatcattttatctgcaactttaaagcgtacatacgaggatgacttaaagtctatcttttatgcgtccaatgttttaaaacaaggctatactatctcaaaaattaaacatgctccacaacctgaagtcaattttaagcaatttagaacagcacgtcatttaaccagtgttttagctgtagttaatgatgaagatattggagctatggtaattaaactagttaaacttattttcatgcttgattatgttttattccattcaattcaaaaaagctatacaacacatatgaatgagctaaaaaattgtttcgattacatagctgaattagataatcattattcattagcaatgtatcgtagaacgctagaatgctatactgaaccacaaattgatgattcaaatgatggcatagtattctccgagttaacacatccactcatagcagatgcagtagccaatgatttctcactatcacaaaatatactgttaactggatctaatgcttcgggtaaatcaacatttatgaaatccatagcaataaacatcattcttgcatcggctatacaaacagttaccgcaggcaaatttgtatatcaacctggaattgtgttcacgtcaatggcaaatgccgatgatgtgttatcaggcgatagttattttatggctgaattaaaatctattaagcgtattgttgaaattcctgataatcaaaaaatatactgctttatcgatgaaatttttaaaggtaccaacacaactgaacgaattgccgcttcagaatcagtactatcatttttacatgaaaaatctaactttagagttattgcagcaacacatgatattgagttagctgaactcttaaaacaacgttatgaaaattatcatttcaatgaggtaatagaaaataataacatacattttgattacaaaattaagcctggcaaagcaaatacacgtaatgccatcgaattattaaaaatcacttcatttccagcaaaaatatatgaacgagcaaaagataatgtttccaatggttagcatgaatcttgaacatcaatcaatgatcaagtcgctacaatgctatattgacagtctttgactaaatgaaaatgcgcttgtaacaagttttttcaatactagtcaggggccccaacaaagaggaattggatttccaatttctacaggcaatggaagttggggtgtgggccccaacataataaatcattagtggttctttatcttttctgtctcactcccctaattacaatataaaaacgtcagctatcacatgacagaagactatgaacagcttcaataatgttcatcgtaatcatgttaataactgacgtttattttattctgcagaatactcttctaaatctatattgctgtgcccatttaatgctaaatcagcaaatcgaccttgctgatacaaatagtggccggcaacacctatcattgcagcattatctgtgcataatttaggacttgggatagttaattgaatgtcattgactttgcattgatccgctaaagattgacgtaatcctttattactcgccacgccaccagcaacaattaatcgctgaacaccatattctttacaagcttgaatagctttaaacgtaagcacctctacaacactgttttgaaagctcgttgctacgttagcttcaatgattggaatatttttttgtcgttgattgtgaagttgattgattacggcacttttcaacccactaaaactaaagtcataactatctttatccaaccaaacacgagggaatgaataagtatcttcaccttcagctgccaaacgatcaacttgtggaccacctggataatttaaaccaattgttcgtgccactttatcataagcctcacctactgcgtcatctcgtgtttcaccaatgacttcaaatgttaaatgatctttcatataaactaattcagtatgtccacctgagacaataagtgcaattaacgggaatgttaatggctcttctatgtgattagcatatatgtgtcctgcaatatgatgaacaggaataagtggcttatcgtaagcaaatgccaatgctttggctgcattaacacctattagtaacgcaccaattagtccagggccttctgtaaccgctatggcatcaatatcttccattgatacgtcggcatccactagagcctcgtttattgttgttgttataccttcaacgtgatgtctacttgccacttcgggaacgacaccgccaaatcgtttatgactttcaatctgacttaaaactgtatttgataaaatatctctaccattttttataacactaacgcttgtttcatcacaacttgtttcaacagctagtattaatatatctttagtcatttaaattcacccacataaccattgcgtcctcaccttcaccataataatttttacgtttaccaccatattgaaatcctaaattttcatatacatgttgtgccactttattattaactcttacttctaaactcatcacatcacaagtgtgacttgcatagtttattccgtattttaaaagcatttgacctaaaccatatcctctataattatcatcgattgcaactgtcgtaatttgagcttgatcgataacaatccataaacctaaataaccaataatttgttgttcaaattctaagacaaaatatttcgcaaagttattttgctctatttcatgataaaatgcgtcaattgtccaagaactatcattgaaactccgacgctcaatatcaaagacttgtggcacatcttctttggtcatctctctaatgtttaattgttcttttgactgttgatccaatttcgttccgcctcagctaatttatggtatttaggagtaaatgtatgtacgtctgaaggtttatctatcaattgatacatgactgatgcatttggtagctgcgcaatcacatcaccttgtaaatcatcttgtaattttactgtatctttcccaatataaataaatggttggtttaaatcttctaaaaaagctcgcaatgcttctatcgacatatattgatcttctaaaatagtcactaattgaccattttgccactggaatatgcctgtataaactgcttgtcgtcttgcatcaaacacaggaaccaataatttatcagtatgatcgattgttgctgccaatgcctttaatgatgaaacaccatataatttaacatttaacgcatacgctaatgttttagcaacagtaacaccgatacgtaagccagtatatgaaccaggaccttcagcaacaataattgcatctaatttctgtttagctattttgctctgctcaaatagctgactaatcgcaggcattaattgcactgaatgattttgtttagaatccgtagttatttcagctaaaacttcatcgttttgcatcaatgctactgataatggttgattcgatgtatcaatgagcagcgaattcatggataattgcctccttaatttgttcgtaatgttctccttgcgcgaacaactcaatttgtcttgaattttcagatattgttgaaatgttaatagataaatgcgtcgctgggagtaaatcttttataaattgactccattcaataacagtaattgcctgatcttcgaaaaattcatcaaaccctaaatcttcatcagaatcttctaagcgataacaatccatatgatgcaattttaaatttttacccctatatgatttaatgatgttaaatgtcggggaattaatcgtacgtcttacaccaagagcttttcctataaattgcgttaacgttgttttacctgctcctaaatctccgttaagtaaaatcaaatcaccacttttcaattgctcaactaaaaacatagcaaattgattcatttcatctaaattatttatctttatcaatgttgattctcctatattatgcttttcattcataaaaatgattatccattgttcaatcgtatctaactttatatttaacctttatattgtaacaaatttcaacttaaatttcttatctttgaaacagattatcccttcaaaattaattgtaagaaaatttaaaatatttgttgacatactaaagcagatatagtaaattaaatttatcgaatttttagacaattctaactattaaaatgatatataccattcacggaaggagtataataaaatgcttaatcaatatactgaacatcaaccgacaacttcaaatattattattttattatactctttaggactcgaacgttagtaaatatttactaaacgctttaagtcctatttctgtttgaatgggacttgtaaacgtcccaataatattgggacgtttttttatgttttatctttcaattacttatttttattactataaaacatgattaatcattaaaatttacgggggaatttactatgcgaagcgacatgatcaaaaaaggagatcaccaagcaccagcaagaagtcttttacatgccacgggcgcgcttaaaagtccaactgatatgaacaagccatttgtagctatttgtaactcttatattgatatcgttccaggacatgttcatttaagagagcttgcagatatagctaaagaagcaattagagaagccggtgccattccatttgaattcaatacaattggtgttgatgatggaatagctatgggacatataggaatgcgatattctctaccatcacgtgaaattattgcagatgcagctgaaactgtaattaacgctcattggtttgacggcgtattttacattcctaattgtgacaagattacacccggtatgattttagcagccatgaggacaaacgtaccagctatcttttgctctggtggaccaatgaaagctggcttatctgcacatggtaaagcattaacactttcatcaatgtttgaagctgtaggcgcttttaaagaaggatcgatttctaaagaagaatttttagatatggaacaaaatgcctgccctacttgtggttcatgtgctgggatgtttactgcaaattcaatgaactgtttgatggaagttttaggtctagcattaccatacaacggtactgcacttgcaatcagtgatcagcgacgcgaaatgattcgccaagcagcttttaaattagttgaaaatattaaaaatgatttaaaaccacgtgatatcgttactcgcgaagcaattgatgatgcatttgcacttgatatggctatgggtggttcaacaaacacagtactgcatacgttagccattgccaatgaagctggtattgattatgacttagagcgcattaatgctattgccaaacgcacgccatatttatcaaaaatagcacctagttcatcgtattcaatgcatgatgtgcatgaagctggtggcgtcccagcaattattaatgaattgatgaagaaagatggcacgttacacccagatagaatcacagttactggcaaaacgttacgtgaaaataacgaaggcaaagaaattaagaactttgatgtcattcaccctcttgatgcaccatatgatgcacaaggtggtttatctatcttatttggtaatatcgcaccaaaaggcgcagttattaaagttggcggcgttgatccatctatcaaaacatttactgggaaagcaatttgtttcaattcgcatgatgaagctgttgaagcaatagacaatcgtaccgttcgtgcaggccacgtcgttgtcattagatatgaaggaccaaaaggtggaccaggtatgcctgaaatgttagcacctacttcctctattgttggtcgtggcttaggtaaagatgttgcattaattactgatggtcgtttttccggtgccacaagaggtattgcagttggtcatatttcccctgaagctgcatctggtggaccaattgccttaattgaagatggagatgagattactattgatttaacaaatcgtacattaaacgtaaaccagcctgaagatgttctagcgcgtcgccgagaatctttaacaccatttaaagcgaaagtaaaaacaggttatctagctcgttatactgccctagtaactagcgcaaatacaggtggcgtcatgcaagtccctgagaatttaatttaatttattttatattggagatggttaaaatgtctaaaactcaacatgaagtaaaccaaaatattgaccctttaaaaatggctgaatcacttgaacctgaacaactaaatgaaaaaactttaaatgacatgcgttcaggatcagaagttctagtagaagctctacttaaagaaaatgtggattatttattcggttatcctggtggtgccgtactacctttatacgacacattttatgatggtaaaatcaaacatattttagcaagacacgaacaaggtgctgttcatgctgcagaaggttatgcacgtgtatctggtaaaactggcgtcgttgtagttacaagcggtccaggtgcaacaaatgtaatgacaggtattacggatgcacattgcgactctttacctctagttgtattcactggacaagttgctacaccaggcattggtaaagatgcattccaagaagcggatattctatctatgacatcgccaattacaaaacaaaattatcaagtgaaacgtgttgaagatatacctaaaatcgtacacgaagctttccatgtagctaattctggacgcaaaggtcctgtagtgattgattttccaaaagatatgggtgttttagctacaaatgtagatttatgcgacgaaatcaatattccaggttatggagttgttacagaaccagaaaataaagacattgacactttcatctcacttttaaaagaagcgaaaaagcctgtcgtattagccggcgcaggtattaatcaatcaaaatcaaatcaattattaacacagtttgttaataaacatcaaatcccaacagttactactttactaggtctaggtgctgtaccttatgaggatacactatttttaggtatgggaggtatgcatggttcttatgctagtaacatggcattaactgagtgtgatttactcattaatttaggtagccgcttcgatgatagattagcaagcaaacctgatgcctttgcacctaacgccaaaattgtacatgtagatattgatccttcagaaatcaataaagttattcatgtagatttaggaattattgcagattgtaaaagatttttagaatgtttaaatgataaaaatgttgagactatagaacacagtgactgggttaaacattgtcaaaataataagcagaaacacccatttaaacttggtgaagaagatcaagtattttgtaagccacaacaaacaatcgaatatattggcaaaattacaaatggtgaagcaattgttactacagacgtgggacaacatcaaatgtgggcagctcaattttatccatttaaaaatcacggacaatgggttacaagcggtggtttaggaacaatgggattcggtattccttcgtcaattggtgccaaattagctaatcctgataaaacagtcgtatgtttcgttggtgacggtggtttccaaatgacaaaccaagaaatggcactattacccgaatatggtttagatgtcaaaatcgtactaatcaataatggaacattaggtatggttaaacaatggcaagataagttctttaatcaacgcttctcacactcagtatttaatggtcaacctgattttatgaaaatggcagaagcatatggcgtcaaaggtttcttaatcgataagccagaacaactggaagaacaattagatacagcgtttgcttatcaagggccagctttaattgaggttcgtatttcccctactgaagctgtaaacccaatggttccgagtggcaaatcaaatcatgaaatggagggcttataatgacaagaattcttaaattacaagttgcggatcaagtcagcacgctaaatcgaattacaagtgcttttgttcgcctacaatataatatcgatacattacatgttacacattctgaacaacctgggatttctaacatggaaattcaagtcgatattcaagatgatacatcacttcatattttaattaaaaaattaaaacaacaaattaatgttttaacggttgaatgctacgaccttgttgataacgaagcttaattttaagacaaaggcaatgatgcgctaattagttatagatatatcataggctgctagttaacatctgccactattacaaagttatatttcagaattttcgaaaaacaaaacatttaattatttggaggaatttattatgacaacagtttattatgatcaagatgtaaaaacggacgctttacaaggcaaaaaaattgcagtagtaggttatggatcacaaggccacgcgcatgcacaaaacttaaaagacaatggatatgatgttgtcatcggtattcgaccaggtcgttcttttgacaaagctaaagaagatggatttgatgtgttccctgttgcagaagcagttaagcaagctgatgtaattatggtgctattacctgatgaaattcaaggtgatgtttacaaaaacgaaattgaaccaaatttagaaaaacataatacgcttgcatttgctcatggctttaacattcattttggtgttattcaaccaccagctgatgttgatgtatttttagtagctcctaaaggaccgggtcatttagttagacgtacatttgttgaaggttctgctgtaccatcactatttggtattcaacaagacgcttcaggtcaagcacgtaatattgctttaagttatgcaaaaggtattggtgcaactcgtgcaggtgttattgaaacaacatttaaagaagaaacagagacagatttatttggtgaacaagcagtactttgcggtggtgtatcgaaattaattcaaagtggctttgaaacattagtagaagcgggttatcaaccagaattagcttattttgaagtattacatgaaatgaaattaatcgttgatttgatgtatgaaggcggtatggaaaatgtacgttactcaatttcaaatactgctgaatttggtgactatgtttcaggaccacgtgttatcacaccagatgttaaagaaaatatgaaagctgtattaactgatatccaaaatggtaacttcagtaatcgctttatcgaagacaataaaaatggattcaaagaattttataaattacgcgaagaacaacatggtcatcaaattgaaaaagttggtcgtgaattacgcgaaatgatgccttttataaaatctaaaagcattgaaaaataagatagacctacaatgaggagttgttaaatatgagtagtcatattcaaatttttgatacgacactaagagacggtgaacaaacaccaggagtgaattttacttttgatgaacgcttgcgtattgcattgcaattagaaaaatggggtgtagatgttattgaagctggatttcctgcttcaagtacaggtagctttaaatctgttcaagcaattgcacaaacattaacaacaacggctgtatgtggtttagctagatgtaaaaaatctgacatcgatgctgtatatgaagcaacaaaagatgcagcgaagccggtcgtgcatgtttttatagcgacatcacctattcatcttgaacataaacttaaaatgtctcaagaagacgttttagcatctattaaagaacatgtcacatacgcgaaacaattatttgacgttgttcaattttcacctgaagatgcaacgcgtactgaattaccattcttagtgaaatgtgtacaaactgccgttgacgctggagctacagttattaatattcctgatacagtcggctacagttaccatgatgaatatgcacatattttcaaaaccttaacagaatctgtaacatcttcaaatgaaattatttatagtgctcattgccatgacgatctaggaatggctgtttcaaatagtttagctgcaattgaaggcggtgcgagacgaattgaaggcactgtaaatggtattggtgaacgagcaggtaatgcagcacttgaagaagtcgcgcttgcactatacgttcgaaatgatcattatggtgctcaaactgcccttaatctcgaagaaactaaaaaaacatcggatttaatttcaagatatgcaggtattcgagtgcctagaaataaagcaattgttggccaaaatgcatttagtcatgaatcaggtattcaccaagatggcgtattaaaacatcgtgaaacatatgaaattatgacacctcaacttgttggtgtaagcacgactgaacttccattaggaaaattatctggtaaacacgccttctcagagaagttaaaagcattaggttatgacattgataaagaagcgcaaatagatttatttaaacaattcaaggccattgcggacaaaaagaaatctgtttcagatagagatattcatgcgattattcaaggttctgagcatgagcatcaagcactttataaattggaaacactgcaactacaatatgtctctagcggccttcaaagtgctgttgttgttattaaagataaagagggtcatatttaccaggattcaagtattggtactggttcaatcgtagcaatttacaatgcagttgatcgtattttccaaaaagaaacagaattaattgattatcgtattaattctgtcactgaaggtactgatgcccaagcagaagtacatgtaaatttattgattgaaggtaagactgtcaatggctttggtattgatcatgatattttacaagcctcttgtaaagcatacgtagaagcacatgctaaatttgcagctgaaaatgttgaaaaggtaggtaattaattatgacttataacattgttgccctacctggtgatggaatcggtccagaaattttgaacggatctctatccttgcttgaaattataagtaataaatataactttaattatcaaatagagcaccacgaatttggtggtgcctctattgatacattcggcgagcctttaactgagaaaaccttaaatgcgtgtaaaagagcagatgctattttactgggtgcaatcggtggacctaaatggacagatcctaacaatcgaccagaacaaggattattaaaattacgtaaatcattaaatttatttgcaaatatacgccccactaccgttgtcaaaggcgctagttctttatcacctttaaaggaagaacgcgttgaaggcacagatttagttatagtccgtgaattgacaagtggtatttattttggagaacctagacattttaataatcacgaggccttagattctcttacttatacaagagaagaaatagaacgcattgttcacgtagcatttaaattggccgcttcaagacgaggaaaactaacatcagttgataaagaaaatgtattagcttctagtaaattgtggcgcaaagtcgtaaatgaagtgagtcaattatatccagaagtaacagtaaatcacttacttgttgatgcttgtagtatgcatttaatcacaaatccaaaacaatttgacgtcatcgtttgtgaaaacttatttggcgatattttaagtgatgaagcttcagtgattcctggttcacttggtttatcaccttctgctagttttagtaacgatggtccaagattatatgagcctattcatggatcagcaccagatattgcaggtaaaaacgttgccaatccatttggaatgattctatctttagcgatgtgtttacgtgaaagcttaaatcaaccagatgctgcagatgaattagaacaacatatttacaacatgattgaacatgggcaaacgacagcagatttaggcggcaaactgaatactactgatattttcgaaattctatctcaaaaattgaatcactaagggggagatgtaaatgggtcaaacattatttgacaaggtgtggaacagacatgtgttatacgggaaattgggcgaaccgcaactattatacattgatttacaccttatacatgaagttacttctcctcaagcatttgaaggacttaggcttcaaaacagaaaattaagacgcccagatttaacatttgcaacactcgatcacaatgttcctactattgatattttcaatattaaagatgaaattgcaaacaaacaaatcacaacattacaaaaaaacgccatagattttggggtgcatatttttgatatgggttctgatgaacaaggtattgttcacatggtaggacctgagacaggacttacacagcctggcaaaacaatcgtttgtggtgactctcacacagcaacacatggagcatttggtgctattgcatttggaattggaacaagtgaagttgaacatgttttcgcaactcaaacgctatggcaaacaaaacccaaaaacttaaaaatcgatattaatggtaccttaccaacaggcgtctatgctaaggacattattctgcatttaattaaaacgtatggtgttgactttggtacaggctatgctttggaatttactggcgaaacaattaaaaacctttcaatggacggtcgaatgactatttgtaacatggctatcgaaggtggtgccaaatacggcataatccaacctgacgatataacatttgaatatgttaaagggagaccatttgctgataacttcgctaaatcagttgataagtggcgtgagctatattctgatgacgacgcgatatttgatcgtgtaattgaacttgatgtttcaacattagaaccacaagtgacatggggaactaatcctgaaatgggtgttaatttcagtgaaccattccctgaaatcagtgatatcaacgatcaacgtgcgtatgattatatggggttagagccaggacaaaaagctgaagatatcgacttagggtatgttttcctcggttcatgtacaaatgctagactttcagatttgattgaagctagtcatattgttaaaggaaataaagttcacccaaatattacagctattgtcgtaccaggttctcgtacagtaaaaaaagaagctgaaaaattaggtctagatactatctttaaaaatgcaggatttgaatggcgtgaaccaggatgttcaatgtgtttaggcatgaatcctgaccaagtacctgagggcgtacattgtgcatctacaagtaatcgaaactttgaaggacgacaaggcaaaggtgctagaacacatttagtatcccctgctatggcagcagcagcagctattcatggtaaatttgtggacgtaagaaaggtggttgtttaaatggcagcaatcaaacctattacaacatataaaggtaaaatagtccctcttttcaacgataatatcgatacagatcaaatcattcctaaggtacacttaaagcgtatttcaaaaagtggctttggtccatttgcttttgatgaatggcggtatttacctgatggttcagataatcctgatttcaatccaaataagcctaaatataaaggtgcatccatattaattactggagataattttggatgtggttcaagtcgtgaacatgcagcttgggcacttaaggactatggctttcatattattattgcaggaagtttcagtgacattttttatatgaattgtacaaaaaatgcaatgttaccaattgttttagaaaaaaatgcacgtgaacatcttgctaaatatgttgaaattgaggtcgatttaccaaatcaaactgtgtcatcaccagacaagagtttccattttgaaattgatgaaacttggaagaataaacttgtaaatggcttagatgacattgcaatcaccctacaatatgaatcattaatagaaaaatatgaaaaatcactttaagggagttgaatattatgacagtcaaaacaacagtttctacgaaagatatcgatgaagcatttttaagacttaaagatattgtcaaagaaacacctttacaattagaccattacttatctcaaaagtatgattgtaaagtttatttaaaacgagaagatttacaatgggtacgttcttttaaattaagaggtgcttacaacgctatttctgttttatcagatgaagctaaaagtaaaggtattacatgtgcgagtgcaggtaatcatgctcaaggtgttgcctatacagctaaaaaacttaatttaaacgctgttatctttatgccagtcactacacctttacaaaaggtaaatcaagtaaagttctttggaaatagtaacgttgaagttgtactcactggtgatacatttgatcactgtttagctgaagctttaacttatacaagtgaacatcaaatgaactttatagatccattcaataatgttcatacaatttctggacaaggtacgcttgctaaagaaatgctagaacaagcaaagtctgacaatgttaactttgattatctatttgccgcaattggtggtggtggtttaatttcaggtattagtacctattttaaatcctattctcctaacacaaaaattatcggagttgaaccttcaggtgctagtagtatgtatgaatctgttgtcgtaaataatcaagttatcacattacctaatatcgataaatttgtcgatggagcttctgtagccagagttggcgatattacttttgaaattgccaaaaaaaatgtagataactacgtacaagtagatgaaggtgctgtatgttcaacaattttggatatgtattcaaaacaagcaatagtagcagaacccgctggcgctttaagtgtaagtgcgcttgaaaactataaagatcatattaaaggtaaaacagtggtttgtgtcattagtggtggtaataatgatattaatcgaatgaaagaaattgaagaacgttcattactatatgaagaaatgaagcattactttatcttaaatttccctcaacgtccaggtgcattgagagaatttgtaaatgacgtattaggacctcaagacgatattactaaatttgaatacttaaaaaaatcttctcaaaatacaggtactgtcattattggtattcaacttaaagatcatgatgatttaatacaactcaaacaacgtgtaaatcaattcgatccttccaatatttatattaatgaaaataagatgttatattcattgttaatttaacacatagtaagaaaagcagtcataaattgatttctgattgaaatcatcttatgactgctttttattatgctttacattattgaggttgtacgctttgtataccatcgtatatttctttgagcctaaaatcttctttgcctttacttttttactttgctactttagacataaaaaaagagaccttgcggtctcaacttgcctggcaacgttctactctagcggaacgtaagttggctaccttcgtcgctaagaacctttcttgacttgtgacaatcgcttgcttctttcctctccttcggctctcgcttactcatttagctctactaaactcgttgcgctcttttctcgtttcgtcagattcaaacattttcacttcgtcaagccatttttctttgtgtttgcttttttactttgctactttagacgtaaaaaaaagagaccttgcggtctcaacttgcctggcaacgttctactctagcggaacgtaagttggctaccttcgtcgctaagaacctttcttgacttgtgacaatcgcttgcttctttcctcttcttcggctctcgcttactcatttagctctactaaactcgttgcgctcgtttcgtcagattcaaacgttttcacttcgccaagccatttttctttgtgtttgctttttattttgacgttttagacataaaaaaagagacctcacggtctcaatgcggctcatcgcatccattttttgcctggcaacgttctactctagcggaacgtaagttcgactaccatcgacgctaaggagcttaacttctgtgttcggcatgggaacaggtgtgacctccttgctatagtcaccagacatatgaatgtagattatacattcaaaactagatagtaagtaaaagtgattttgcttcgcaaaacatttaaatttgattaagtcttcgatcgattagtattcgtcagctccacatgtcaccatgcttccacctcgaacctattaacctcatcatctttgagggatcttataaccgaagttgggaaatctcatcttgaggggggcttcatgcttagatgctttcagcacttatcccgtccacacatagctacccagctatgccgttggcacgacaactggtacaccagaggtatgtccatcccggtcctctcgtactaaggacagctcctctcaaatttcctacgcccacgacggatagggaccgaactgtctcacgacgttctgaacccagctcgcgtaccgctttaatgggcgaacagcccaacccttgggaccgactacagccccaggatgcgatgagccgacatcgaggtgccaaacctccccgtcgatgtgaactcttgggggagataagcctgttatccccggggtagcttttatccgttgagcgatggcccttccatgcggaaccaccggatcactaagtccgtctttcgaccctgctcgacttgtaggtctcgcagtcaagctcccttatgcctttacactctatgaatgatttccaaccattctgagggaacctttgagcgcctccgttaccttttaggaggcgaccgccccagtcaaactgcccgcctgacactgtctcccaccacgataagtggtgcgggttagaaagccaacacagctagggtagtatcccaccagcgcctccacgtaagctagcgctcacgtttcaaaggctcctacctatcctgtacaagctgtgccgaatttcaatatcaggctacagtaaagctccacggggtctttccgtcctgtcgcgggtaacctgcatcttcacaggtactatgatttcaccgagtctctcgttgagacagtgcccaaatcgttacgcctttcgtgcgggtcggaacttacccgacaaggaatttcgctaccttaggaccgttatagttacggccgccgtttactggggcttcgattcgtagcttcgcagaagctaaccactcctcttaaccttccagcaccgggcaggcgtcagcccctatacatcaccttacggtttagcagagacctgtgtttttgataaacagtcgcttgggcctattcactgcggctcttctgggcgttaaccctaaagagcaccccttctcccgaagttacggggtcattttgccgagttccttaacgagagttcgctcgctcaccttagaattctcatcttgactacctgtgtcggtttgcggtacgggcacctattttctatctagaggcttttctcggcagtgtgaaatcaacgactcgaagacacaatgtcttctccccatcacagctcagccttaatgagtaccggatttgcctaatactcagccttactgcttagacgtgcaatccaatcgcacgcttcgcctatcctactgcgtcccccccatcgattaaaacgattataggtggtacaggaatatcaacctgttatccatcgcctacgcctgtcggcctcagcttaggacccgactaacccagagcggacgagccttcctctggaaaccttagtcaatcggtggacgggattctcacccgtctttcgctactcacaccggcattctcacttctaagcgctccacatgtccttacgatcatgcttcaacgcccttagaacgctctcctaccattgtccaaaggacaatccacagcttcggtaatatgtttagccccggtacattttcggcgcagtgtcactcgactagtgagctattacgcactctttaaatgatggctgcttctaagccaacatcctagttgtctgggcaacgccacatccttttccacttaacatatattttgggaccttagctggtggtctgggctgtttccctttcgaacacggaccttatcacccatgttctgactcccaagttaaattaattggcattcggagtttgtctgaattcggtaacccgagaggggcccctcgtccaaacagtgctctacctccaataatcatcacttgaggctagccctaaagctatttcggagagaaccagctatctccaggttcgattggaatttctccgctaccctcagttcatccgctcacttttcaacgtaagtcggttcggtcctccattcagtgttacctgaacttcaacctgaccaagggtagatcacctggtttcgggtctacgaccaaatactaaacgccctattcagactcgctttcgctacggctccacatttactgcttaaccttgcatcaaatcgtaactcgccggttcattctacaaaaggcacgccatcacccattaacgggctctgactacttgtaagcacacggtttcaggttctatttcactccccttccggggtgcttttcacctttccctcacggtactggttcactatcggtcactagagagtatttagccttaggagatggtcctcccagattccgacggaatttcacgtgctccgtcgtactcaggatccactcaagagagacaacattttcgactacaggattattaccttctttgattcatctttccagatgattcgtctaatgtcgtcctttgtaactccgtatagagtgtcctacaaccccaacaagcaagcttgttggtttgggctcttcccgtttcgctcgccgctactaagggaatcgaattttctttctcttcctccgggtactaagatgtttcagttctccgggtgtgccttctgatatgctatgtattcacatatcgataacatgacataactcatgctgggtttccccattcggaaatctctggatcaaagcttacttacagctccccaaagcatatcgtcgttagtaacgtccttcatcggcttctagtgccaaggcatccaccgtgcgcccttaataacttaatctatgtttccaccatttttataagtcaaacgttaacatgaagttacgttcttttataaaaagatttaaacgcgttattaatcttgtgagtgttctttcgaacactagcgattatttcttatgaattcaagcttatttaaaactctttattcactcggttttgcttggtaaaatctatattttacttacttatctagttttcaatgtacaatttctttttagtcaagcgctcgcatactgctttgttttcaaaaaatcaaatgctcatttacaaaagtaaactccgctttaatttttcttaacgcattgtctgacaaccgctttctttaaaaagaatagattgtcaagcgttcgcatacagctttattttcataagcaatatcgctttaaccaaaaaatatttgaatgttaaataaacattcaaaactgaatacaatatgtcacgttattccgcatcttctgaagaagatgttccgaatatatccttagaaaggaggtgatccagccgcaccttccgatacggctaccttgttacgacttcaccccaatcatttgtcccaccttcgacggctagctcctaaaaggttactccaccggcttcgggtgttacaaactctcgtggtgtgacgggcggtgtgtacaagacccgggaacgtattcaccgtagcatgctgatctacgattactagcgattccagcttcatgtagtcgagttgcagactacaatccgaactgagaacaactttatgggatttgcttgacctcgcggtttcgctgccctttgtattgtccattgtagcacgtgtgtagcccaaatcataaggggcatgatgatttgacgtcatccccaccttctccggtttgtcaccggcagtcaacttagagtgcccaacttaatgatggcaactaagcttaagggttgcgctcgttgcgggacttaacccaacatctcacgacacgagctgacgacaaccatgcaccacctgtcactttgtcccccgaaggggaaggctctatctctagagttgtcaaaggatgtcaagatttggtaaggttcttcgcgttgcttcgaattaaaccacatgctccaccgcttgtgcgggtccccgtcaattcctttgagtttcaaccttgcggtcgtactccccaggcggagtgcttaatgcgttagctgcagcactaaggggcggaaaccccctaacacttagcactcatcgtttacggcgtggactaccagggtatctaatcctgtttgatccccacgctttcgcacatcagcgtcagttacagaccagaaagtcgccttcgccactggtgttcctccatatctctgcgcatttcaccgctacacatggaattccactttcctcttctgcactcaagttttccagtttccaatgaccctccacggttgagccgtgggctttcacatcagacttaaaaaaccgcctacgcgcgctttacgcccaataattccggataacgcttgccacctacgtattaccgcggctgctggcacgtagttagccgtggctttctgattaggtaccgtcaagatgtgcacagttacttacacatatgttcttccctaataacagagttttacgatccgaagaccttcatcactcacgcggcgttgctccgtcaggctttcgcccattgcggaagattccctactgctgcctcccgtaggagtctggaccgtgtctcagttccagtgtggccgatcaccctctcaggtcggctatgcatcgttgccttggtaagccgttaccttaccaactagctaatgcagcgcggatccatctataagtgacagcaagaccgtctttcacttttgaaccatgcggttcaaaatattatccggtattagctccggtttcccgaagttatcccagtcttataggtaggttatccacgtgttactcacccgtccgccgctaacatcagagaagcaagcttctcgtccgttcgctcgacttgcatgtattaggcacgccgccagcgttcatcctgagccaggatcaaactctccataaaaattatgatgtttgattagctcataaatactaaataatgtttgtaacttatagttacgtttttggaattaacgttgacatattgtcattcagttttcaatgttcattaaaattatctatggagcgggtgatgggaatcgaacccacaacatcagcttggaaggctgaggttttgccattaaactacacccgcttatttaattaagaattttgatgcggccgagaggatttgaacctccacgggatttctcccactaggccctcaacctagcgcgtctgccattccgccacgaccgcggatataggcatttaaaacatcttcgtttttcagaacgttatttattatattatgattaaaaatatttgtcaataacttttaatcgtttttttacattaaattaatttgtgttatcagttgttaacacaacgttatttataataaaacattaagaacttattgtcaacatattttataaattaaatttagaattgactgtctttcaaatcaaagtttatttaatttgttcttttttaaggaacgtgtttaatcatactaactataagctgtacagtcaatagataaattcaatcaaaatgtcattaaaaatgtataattatcttttgtgccgctttaaagctttaattgggtaaagtttatatataattcattactaaaatacgccaagatttttaatctaatctatttaatttcatcctatcaattcacaatttatgccattacctatattaaaagtagaaaagccgcgattgcgaagtattaaattacgacaatctcggctttaaacattttataaacacaatttcttcttattcaattactatgtttaccaatcaaaataactcactgataaattctatataaattccatacaactcataaataatcttacatatacatgaattagctctatttgtattgtacttatttcaattgtcttttcattcttaattttccattgcaatgtccgcaacgcatacgattcgtatcaactttacggatacgtatatattttgcatgacatttagtgcaataatattcataatttgcccgttgttgatagctttcaatgctgttacaaaatctaggcgctccaacctgttggctcaatcgtttaaaatcttgatctttatgttgataacctttaccagcaatatgcaagtgataatgacacagttcatgcagtataatttttacaacagcatcttctccataatgctcatattgttttggattaatttcaatatcatgagactttaaaagataacgtccgcctgttgtacgtaaccttttattaaaatatgcacgatgtcgaaacgtacgtccaaatttttcttccgaaaggttctcaaccattcgttgaagtatttcgttattcatgtggatcaatcattgttaatgatactttgtctttatttttgtcaatactgtaaatccaaacgtcaacgatatcaccgacactgacaatatccattggattttttacgaatttcttagaaagtttcgaaacatggacaagtccatcttgtttaacacctatatctacaaatgctccaaaatctactacatttctaactgtgccactcaatttcattccttcttttaaatcttcaattgatagcacatcggatttaaggattggtgtttcaaactcgtcccttggatctcgattaggtgctttcaaggatttaataatatcctctaatgtaggtacaccgacttgtaattcaatcgccagttcatccatatccaatgaatttaatttagcttttaatgcatcactacctaaatcattgccaccaaatccgagtttatctaataactgatacgttactttatagctttcgggatgaatcgatgtattatccaatggctctgacccgtctactattcttaaaaatcctatactctgctcaaaagttttagcacccaaacgcttaatcttgcttaactctttattatgctttattgcgccattttcttctctatatgcaattatatttttagcaatttgcgaacttagaccagacacatattgtaataatgatgatgatgctgtattgacatcaacacctacttggttaactgctgtttcaacaacgaaagttaatgcattttctagtgctttttgattaacatcatgctggtattgtccaacaccaatagatttaggatcgattttaactaattcacttaatggatcttgaacgcgtcgtccaattgatacggcacttctttcttccacttgaaaatcaggaaattcatctctagcaatttctgatgctgagtatactgaagcgcccgcttcattgacaatgatgaattgtactggcaactgatgctttttaattaaatctgcaacaaattgttctgtttcacgacttgctgtaccattgccaattgcaattaattgcacatcatacgctttaaccatttgtacaaaatccttctctgcagcttcttttttagaaactggtggatgcggataaatcacaccttttgctataaaagtaccgaatgggttaatgactgctaatttacaacctgttctaaatgcaggatctacgcctaatatttgtttacctttcattggaggttgcagtaatagatttcttaagttttcactaaaaacatctattgcatgattttcagctttttcagttaaatcagcatggatttcacgctctatcgaagggacaattaagcgtttcaagctatctttaatcgcctctaaaatataactgcgatttacattattatgattgatttcttgacgtgcaatgaagtcctctactgctgtcgtatcgaattcaaactttacagataatactttctctttttcgccacgattcacagctaaaactctatgattagcaatgcgtttaattggctcactatatgcatagtacatttcaaaaatacctttttcatcttcagcatttttctttttagatgtagttaacacaccttgatgatacatatcttttaaaatttttgttctatatttaggattatctgaaatttgttccgcaataatatcttgcgcacctttgatagcatcttcaaccgattgcacttcttcatttataaattgttgtgctttttcttcaattgagacttcatgtttacgtgccttcatccatatcgctaatggttctaatcctttacgtttcgcctcagttgcccttgtctttttcttttgtttaaaaggtctatataggtcttcaacacgttgtaatttgttctgttttaaaatatctttctttaattcctcagtaagtaatccttgctgttctatatttttgataacttcttctttacgtttttgtaaattgaccatatattggtattcgtcatcaatttgctttatttgaacttcatctagtccaccagtttgctcttttcgatacctcgcaataaatggtactgtatttttttcttcaagcagtgttaatactgcttcaatttgttttttactaaattgatatttctctatgattgaattaatcaattgattgtccatttacttaacccacactttttcttaaatttactcatttattttaacatattctaaaatacttctattaaggtatgatacttaatgcaattttaactttcaaaacattaaaaacgaattattaggtcatactatattttaaaacgcactaagattattgaaaatgacacaccatcatttcctaaatttcataatctaagcctactttttttagtctaatagcaatccacctatttaagccgacaattagatatcttcttcacttaaattattaatactatatcgcgacatttatgtggatacacattaaactacgttaataatgcattaattcgaaaatcttaattaaattaaaaatacccctcgatttcaattgactaatcaagggataattgtatgaatttttcattataaaacgcatcattaataagcaaattctatttatgtgctgcttcttgtaatttcttaattgccgttctctgaagtcgtgatacatgcatttgacttaaaccgatacgctcacctgtctctttttgactcaaaccttcaataaacgtacattgtatgatttctcgttcgcgatcagataatataggtaatattttttctaaaatcatacgtttttcagttaagtcataatggtcatcttgttgccccataatatctaatagcgtaacagttgaaccatctttatcagcttcaatggaatgatcaacacttaacgcattataactttgtcccatttccattgcttctaacacttcttcttctgaaacttctaatcgatcagctatttcactgatagaaggtgaacgctctaattcagcggttagttcatcgctcacttttttgattcttggtccaatttctttaatacgtctcggaacatgtacactccaagttttatctcgtagatatcttttgatttcaccgattacagtaggtactaaaaaggcttcaaacttccgttcaaaggacatatcgaatctatttatggcacctattaaaccaaccataccaacttgaactaaatcttcgtgatgtgattgtcctttagaatatttatatgccaatgactcaattagtttttggtaatgtttaactaacttatcttgtgcatctgtattcttattttcttggtgttctttaatccattggttaatttgctcaggtgaaacttcattagctgatttcgactctttcgccattatttcgcacctgctctttttttatatacttagtcatactgattgtcacaccagattctttatatactgtcacttcatccattaaagattcgattaaaaataaacctaggccaccttcacgtaaaaagtctatattttcgtctttatcgtaaggacctatttttgatttagttgtttcataatcaaaactgtcacctttatcagaaataacaattttaattttatcttctaaaatttcaaaatatatgttaataatgcccacattgtttttttctttgtatgcatgtttaactgcatttgtcacagcttcactaactgcaatcttggcatcttcaatatcatcatatgtagcaccagctctcgaaaaaacgccagaaagtgttaaacgaattaaacttacatactctgccgatgctggcacgcgcatttcgataaaatcttctttagattgcatgttattcgacctccgttccttcattaacatgcattaaatccttaagaccagtaatttcaaatagtctaccgatacgatctgacacacctaaaatgtatagttctttatcattttggtttaatgcttttaatgtacctacgaataaacctaaacctgtcgaatccatataactcacattttctaaattaacataaatatcacgagttccatcttgtctcataggtgttaaaacctcttctaattcaggcacagtataaacatctaattctccaccgactttaacttcgtaaaatttatcttgagtggttgtttctatattaagattcatttcattacactcctacttattaaaaatatttatcttcattttaagcgctgtatccaccatatttatatttcaaattattatatacccatcgaaataatttctaatcttcttttttaaattaatttactctttttataatcaaaatagtcatatcatcttttttatttgggttttgaagctttaaaattgcttcatagataatttgaacaatatcttgtgggtgcatatgtttatgttttttaatatattctaaaagtttttgtttatctataaaggtaccttcactatttctagcttcagtcacaccatccgttaaaatgataattaaatcatcaaggtatattggaatttcttgttgttgatatcgtgtttgtgaactgattcctaacactctacctctaactgaaatttcttcaaattcttctttttcagcgcgataaatatatccaggctcatgaccagctgaactacaatacaataaatggttcatttcttcatataaaccataaaacattgtgacgaacatattttgattaatattcttttcaacaacacgatttaaacgttttaagccatcactcggtaattgtgagtgtccataagaatccatgccaaactttatcatactcattgctaaagcagctggtataccttttccaatgacatctgcaacagcaaagctcattgtgccatcgttatggtcaattaaattaaaataatctccacttactttttgtgccgccactgaaataacgccaatttgaatactatcaaattgtggaatatctgttttaagcattgtttgttgtaagctagaagctaagtctatctctttatcgtgaacttgaagtttatctaccaatctttgataatctcgataactataaccaaagcctttaacgatttcttgtaagacatctaatgtcttgaacacatcttcacgcgttaagtttaacgtcaatatatagtttttgtgaatatcgacaatgtcttcaggcaagacgtctttacgaatcacttcgtcagtgtatttctcacacttttttatcaattctactttatcttggcacgttaaactttcatcaattaaacccttataatgttgcttaaattcttccacgattagttgcctcctcacttcccttacaaagcaaatgcttaagcaaggataattatgattcacttactaacatttatttaattgcacttatcaattttgtcgtttgcaattttgctgtagatgatacttttaagctaaaaaaactttaggatggaatacctaaagcctaaaaaacttaagacatccttttataataaaaaatatgaatatcataactggtatttgctaaaatctttgtatataagaaattttttcgtacagaatttagaaatagttataattattataaagttattgtcttttatatcaatattttatttatctctgaaaaatacatataatagacgcctaatttttctgatgagctactgcatttagccctaaactaatcattagtgcattatctacttctttcattttatcatcggataagtacgtcagtttttctttcaatcgttttttatcaagtgtacgaatttgctctaataatataactgagtctttatccaatttatactttttcttttcaatctctacatgtgtcggtattttcgctttgttaatcctaccagttattgccgcaacaataactgtaggactatatttattaccagtatcattttgaattatgactacaggtctgactcccccttgttcagatccctgtactggtgataaatctgctaaataaacatctcctcgtctaatcattcattcgttgaattagaagataaatatgtttcgttgcaatcgcatgcttcacactctatcggaaaagcttcgttcgctagggagagatttaaatcagccatttgtgaatatccttcttttaaagattgttctaagctatgacttctattttgactaaaagataacatatgagaacctccaattgattccaaaagttattaaatgacctttaattactctaatgataacaaattttatatgcactgaccatattattttaacaattcatttgttacaaaacgttgatcaccatcatgatagattcgcggcaaacgtctcgacaagttacaaagcacttcataattaatagtatgttgcttttcagctgccacctctaccgactgtggactttctctatgattatctattaaaatcaccgaatctccagctttaacttgatctggcacttttacaattgtctgatccatacatacgcgaccaataacttcgcattgatgaccaattacatttacaaagctaccttgcataatgcgtaaatagccatctgcatatccaataggtaacaatgctattgttgttggatcagtagctgtataagttgcaccataacttacagactcacccgcttgtagcgtctttgtttgaactacattagcaattaattgcacacttggtttaaggtgtactttaactttttgctgtacatactctgatggataatatccataaagggaaattcctggtcttattgcattacagaattggcaatccattaatagagaacctgctgagttctgacaatgtatatattcaggtttaattgcttcattgaccatatctttaaaacggtgatattgttcagttgtcatatctcctggttcgtcagcacaggcaaagtgtgtaaacacgccttcaaatacaagttgctcatattgttgaatgatttcaatcacttcttgatacgttttagtatctttaatacctaaacgtcccattcctgtatctaatttaatatgcaaccataactttttctcttgctcaccagaaatgtttttaattgcttctttcaaccactgtttagacggaaccgttaaggcaactcggtgttgtatcgctttatcaatatctttagctggtaacacacctaagactaaaattttagcagtaatcccatgcattctaagttctatcgcttcatctaacgttgctacagcaaaaaatgtggcaccattttccattaaatgacgtgctactttaacactacctagtccataggcattggctttaacgacagccatcactgttttatttggatgcaatgtactgaatactttgaaatttgatgcaacagcgtttaaatctacattcatatacgcagatctataatatttatctgacatattacttcctcctgtaattcccacacgttttaaaactagattttaattatcattgtataacaaatttaaaatgctgacttttctaaaacaacttggctcatcgcataatgctcagtgtgtgagatactaacatgtacgatgaacccttcgtaatcaatctttggtttgccaagttcgtcgttgtaacaatctatgtcattaaatgcgacatgttttcctaagcctgtgcctaatgctttactgaacgcttcttttgtagcaaacctgccagctaaaaattcaattttacgttgctcatgtgtgaaattgttgaatttgtgctgttcatttttagttaaaatccgctcaaccaatttgggttgcttactatataacacttttattcgatcgatttcgattaaatctacaccaattccatgtatcattgattattcctcatttttattgttttctaaatgtctctcgttatttaaccagcgtttcaatctacgtgcttcacttctatctattaattcaatttcagcttgaccacccgctgtataaagtgtcaaagttgctaatcgatagcgtctcattataggaccaacatcgatatcaatattttgaatacgaaaatatggtattactttttcatccaaaaataaaatgccgtttcgtacacgcaaatggtgtttttcaaacgcatatctgcagtgcttatatcgatagactggtgcaatgacaagcgtgaaaacagcaacaagtaatattacaatcacactactaacaatggatatatagttatctaatatctcccaaaatagccagttcaaaatattaaatgctattaaaattacaagtgctattggtatccaaaacagcacagcacttaacctcatcacttttttagcatgtggtgacataaaattataatcactcatcattttcacctctcaaataccacgacttcaatatttgcacatctttacttcttgcgtattttaagttaatcgattgggctcccacacctttagcaacaataaaactaaaattatttaaattgttgcgtttaagtaatgtatgttgccaagtgtcaaaacctataatgtgatgcgctttaaaataataaatatttcgtttcaatagctcgaaattctggatagtaatttgttcttctgtcattttaaaacccgcatgtttaacataaagatatcctttgatcacaaataaaccaataatgactactgttataatcgtaaataacaataataattgattccaaaaataacagccaattcctgccatagttatgacaataatactaggtattaaaaagtgtctgtggaaacctgacaaaggcataccttcattaacttgttgataagataaatctggtactaaattctggataatttgatatgctttgtctcgtttaataaacggcaatatcgtcacactacctgaatcattgtcatcatcttcgatttttttattttcaaaatcacttgtgatgataaaatgtattgctgtgtagccaaataatcttcgtatatatgactgacgttcaacaacagcttgcaatcgtttcgttggtacagtcactttcttcttgttaaagagaccatattcaattttaagttgttcattttcaagcatcaccgaaaagccataaaatcttatcatcgttataatcgttccaataatatatgccgctattaatactagtaaaatgatgattaatactgaaatacttacaatttgaacccattgactaatttcatggtttaacttcgaccatggaatcaactctcttacagcgccgtaaatcggtactaaagctgctaacgttacaccaatggcgccactggtcattgccataaatagtgattctttaaaattcatctgatatataggaatgcgtttatttttctgattaagtatactattagtgttctgcacttcatctaagcgaccttttgcgatgtcctccacattaccttcaatgtcatgattacagttgtcattctgctcagtactagacttttgcgccacttctgtcttcaactctgtttgcaattgatcaatatagcgttcaagatattcaccttgctttttcgaaataacacttaacacaataccatcacttggcgttttgatttgtaaatccacgccacctatcatttgattaatgaccccttgtgtcatatcaacggactgaatacgttttatatttaattctttacgctttttattaaaaatacctgttgttaaaatgaaataattatcctcaatccaatatcgcgtgttcataattccgacaatttgagaaatgtatgatattaaaaagaatacaaatacaatacctatccataaatatgatacgggattcgtataatcaaaatctttcaattgaaagataacgaaaataaaaaagacgactatgttttgtttgatagcattgattatgccattaaaatatgaaatcggatgtaatttttgaggttcagacatcactttcaacccctctcaaattcgacatagctctcgcttcgattattttaacatcgtcatgagacatcatcggtaaataaatagtatgacctgcagtcataaatccaactttatacaaattaagcactttactaattggattagatttaatcgacaagtattgtaaacgttcaattcgactcgtttcttctttatatattaaaaatgatgtacgatattgtacactgagttgatcaacttgataaaagcgacagtgatattgccataaaggcttaatgattaattttaaaacagtcaaagtacataaaacaaataaaatataaattaagtactgaggccattcaaatcttaaccatataaaataaaaaatgacatacacagctacactcaatataaattctaagccattcgtaatgtagtaatacaacaatgctgacttaggactcttagataacttagtataatctgacatatacccctctccccaaataaaaattatacggatttataatctatttcattttatttttatatgttgataattatagcatatggaatatttcatgctaatttattcttcctaaaggtacatctaaaaatttagttaagcagaaagtacttgaatacctaaaaaagacaccatgttataattttatcaacatgatgtctttcatttatattcaatctttcatcttatcaagagcaatatttagttcaagcacattcacataatcatttgttaacacaccacgctgcttacgatgttgaatcaagtcggccactcttgaagtagatatatgacgagcatcagcaatacgaggtgcttgcttcaatgcattttcaaccgtaatatgcggatctaagcccgacccagaacttgttgtagcatctattgttacatttgaattaccaaatttaacatgatgtttcacgcgtgctattaattcggtgtttccattcgattcattacttccacctgatgatacgacatttttatataatttttcaggattcatattataatcaactgcactcggtctcccgtgaaaatatcgtgtctctgtccagtgctgtccaatcaattttgatccaactatacgattgtcatacgtaattaaactaccatttgcttgttgataaaaaatatttgaccaattaacgtgatagctaacgggaataaaaatccacataataccatagttattattgttaaacaaatactatttcttatcgtattcatggtacaggctccttcctctttacacaaaaaattgtacaatcatatctattaatttaatgcctataaacgggacgattaatccacctaatccataaatcaacatattatttataaaaattctatcaatgctgtaaccctttacttttacacctttcattgcaattggaattaaggcaacaatgattaatgcattgaatatcatagctgatatgattgcagatttaggtgacgataaatgcataatatttagtgaagtcatttctggaatcgttgacatcattagtgcaggtaaaattgcaaagtattttgctacgtcattagccaaactaaatgtcgttaatgcacctctcgtcattaataattgtttgcctatttttacaacctctattaactttgtaggattcgaatctaaatcaattagattggccgcctctttagcactaattgtccctgagttcatagctaatcctatattcgcttgtgctagcgcaggtgcatcatttgtaccatctcctgtcatcgcaacaatatggcctttcgcttgttcatctttgatgactttaattttatcttcgggtttacactctgcaacaaatctatcaacacccgtttcttttgcaattgtagctgctgttaaagcattatcacccgtacacataactgtttcaatccccatttttctcaattcagcaaatcgttctacaagaccatctttaatcacatcttttaaataaatcacgccaagcatgacgttgttttcaatgactattaatggtgtgccacctttactcgatacatccatacagagtgactcaatattaagaggaatattgccttgttgttgtttgacaagatttatcatactattaggtgcacctttgaataccgataattcatttgtaatgattccgctcattctagtttcagctgtaaaaggtttatatgtgccatcaatgtctttaggcagctcatttatatacatctgcttcgctaatcgaacaatactttttccttctggcgtatcatcgtagattgatgacatataagcagcgactatcaatttttccagcatttgttgattcactggtaaaaattcactagcgattcgattgccataagtgattgtacctgtcttgtctaaaatcattacatcgacatctccacatacttctacagcacgtccacttttcgctaatacattgaattgagtaacacgatccatgcctgcaataccaatcgccgataacaaaccaccgattgtcgttggtattaaacatactgttaacgcaatgagcatcgcaataggtaaaattaaatgcaggtaagatgctattggatataatgttacaataacgactaaaaatataattgttaacgttgttaataatgtaaaaagtgcaatttcatttggtgttttatttctttccgccccttcaactaaggcaatcattttatctaaaaaagatgtacccgcttcactctcaacacgtatttctaaccaatcagatgttacaagtgtaccgccaatgactccatcaaaatcgccacctgattcttttatcacaggtgcagactcaccagtaattgcagattcatcaacggttgctaatccatttattacaacgccatcagcagggattgtttctccattttctacccgaatattttgtccggcttttaactctgtggcgttcactatccgatacgcaccattttcttctatcaatcgagcagttaaatttgattgtgcttgtcttaaactatcagcttgcgcttttccacgaccttcagcaaaggcttctgaaaaattagcaaacaatatagttattaataatatgataaaaattgtaatcaaataaccttgcgatagatagctagttccaaatatgtcaggaaaacatattaatatcaacgttaaaatcattccaacctcaacgacaaacattatcggattttttattaattgtttaggattcagcttataaaaactcattttcaaagcttctatcaccattgtttgattgaaatatttatttacatgatgcattttttccatccctttactttattttaaagttaaaaattcaccaataggaccaagtaatagtactggaataaatgtcaaaccacttagtaaaacgataaatacgattagtgatacgccaaaataaggtttatcaatcgctattgtatatttatcttggtggtatgattttttattcactaaacttgatgcaatcattaattgcaaaataattggtatataacgagaaagcaacataatgattcctgtagagatattccagaatgttgtatcatctttcagtccttcaaaccctgatccattgttcgcagcagctgacgtcatttcatacataatttgtgaaataccatgaaaagacggattcgttatactttcatttgctccaggaatcataaaagcaagtgctgaaaatactaaaattaaaattggatgtatgagaaagactaagacaatacatttcatttcacgggcgccaattggcatatttaaatattctggtgttttaccaaccatcaaactgcatataaacaccgtcagtaagacatatatcaataaattcatgagtcctacgccttcgccaccaaatacaacatttagcatcattaataccattgggcctaatccacctagaggcgttaagctatcatgcatgttattaacagaacccgttgtgaatgccgtcgtaataactgtaaatagtgctgacaaacctgctccaaaccgtacctctttaccttccatattcgctccatgaattcctaaatttgctagtattggattaccacgatactcactccacatagttaatgtaagaattgctataaaaatgaaaaacattgcgacaaataataacagcgcatgacgatgtactcgtttaccatgtctacttaacatgcgaccaaataagaacaacattgacataggaagtaacatcatactgcccatttctataaaattgctccaaatatttggattttcaaaaggtgttgcagaatttcctgctaaaaatcctccaccattcgtaccaagatgttttattgattcaagtgatgcaataggtccaaatgcaatatgttgaatatgtccgcttaaagtccgaatcattaaattagcatgcaacgtttgtggtacaccttgagtcatcaataaaatactaattaaacatgataatggtaaaagtactcgaacaataaatcgaacaatatcttgataaaaattaccaatgatattagtcaatccagttaaacgtctcaacatcgctatacaaacggcgtaacctgatgcactagatgtaaacattaaatatgtcattacaatcatttgcgttaaatatgtcacatctgattcaccgttatagtgttgtaaattactatttgttaaaaaagatattgctgtattaaacgctaaatctatcgattggtttaaattatgatttggatttaaaaaaagccattgctgaactattagtaatacaaatgttataacccccataaatccattaaataccagaaaatgtttgacatatgttttagctgacatgtgttctaaatctgtgccgataattttaaaacacatattttcaaatctagtaaatattaaatctactctcgacgattgcaccaatgctacgcgatatagatatccactaaaaacatatgcaatcataaccatcattgttagaaacaaaattatttccatgataaccctcacttaatatatttctaaaatttttcactacgaattaaggcataaaataaatacaaaactaatgcaataactaccaataataaaacgatgagcattgccataacctccttacaacacaacaacatcgtaacaacttgtttatgagacaaatattaattttcaaacttagttattaagaaatcattaagatgtgtatgcagaaataaattttatagcatttaattgtgaagaatattatgatattgctatcgaggtgaaggttatgtcaaacactgaatcgctaaacataggaaaaaagcgtggatctttaacaatttacatcggttacagtccaggtgttggtaaaacatttgagatgctttcaaatgccattgaactatttcaaagtaacgttgatattaaaataggatatattgaaccgcatcaacgtgatgaaacaaatgcattagctgaacaattacttaaaatcgcaaccaattttactaaacatggtagtcatcattttcaatatttagatgtcgaccgcataatcgaagaatcgccgacaatagtacttatcgatgagttagcacatacgaacatttctagagatcgtcatgagaaacgatatatggatattgaagaaattttaaatcatggtatcgatgttcatactactttgaacattcaacatattgaaagtttaagtagtcaaattgaacggatgaccggtgtacatgttaaagaacgtgtacccgactatttcataatgagcgccgatgtattagaagtcgtagatatctcacctgaacaattaattaaacgattaaaagctggcaaggtatataaaaaggataggctagatgtagcatttagtaatttctttacgtatgcccacctaagcgaactgcgtacattgacgttaagaacagttgccgacttgatgagtgataaagaaaaagtccgacacaatcataaaacgtcactcaaacctcatattgctgtggcaattagtgggagtatttataatgaagcagtaattaaagaggcattccatattgctcaaaaagaacatgcaaaattcactgctatttatatagatgtattcgaaataagcaggcaatataaagatagtcaaaagcaagtgcatcaacatctcatgcttgcaaaatctttaggagcaaaagtaaaagtagtttatagccaaaccgttgcattaggattagacgaatggtgtaaaaatcaagatgtaaccaaattaattatcggacaacatattagaaataagcggcgagactttttcaataaacctttaattgaccatttaatgtcctttgaacatagctataatatcgaaatcgttccaatcaaacaaatacctgttgaattgaaaatgaacaaatcaccctatcgtcctaaaggcaaacggttcgccatagatatgttaaaaatgattctgattcaaataatttgtgtaatgatgggactgtggatttatcaacttgataagcatgagtctagtacgattattttaatgatttttctcatcggcatcattttgttatccatttggacgcggtcctacatcattggctttttagcagcaattattaacgtatttgtttttaattatttttttacggaacctagatatacatttgaagtataccgctttgactatcctattacatttatcgtcagcattttaacaagtattttaacgagtgctttattaaaacaaattaaattccaatacgccattactaaaaagcaactttatcgtacagatttattatttcaatttaatgattcgattaaacaaacttatacagttgaaaacttactaataaatgctggataccaaattaatcaattattgcaacaatcaattactatatacgttatcaatcaatccaaagtaattaaaacaataccattgcaaaaccatatcgataatacgactcaacagcatgaacaagcattaagctgggtaattaaaaatgaaagacaagctggtgcaacaacagatacatttccaggcattaataaatggttgataccaattggcacatctccgattaaaggcattctagccattgattaccaaagttctcaagtgattaatccatatgatgcatcaatattagaatcaatgttaaatgaactttctctcgccgttgaaaatgtgacgttgcttaaacaaacgagagaatccatgttacaggctgaacgtcaactgacacattcaaattttttaagatcaatttcgcatgacatacgtacaccgttaacaacaattatggggaatttagatattttggtatcacatagtaaagatatgtctatcatagaaaaggaacaattacttgtgcatagttttcaagaaagtcagtatttatatctattagtaacaaatattttatcattaacaaaattacagtcatcaaatgttcagataaaattgcaaccatatctcgttagtgaattagtagaagaaatcgatatgattttagaacgtcgccatttaaaaaagcgtataactgtatcatcctcagtagatttacagtttatacacattgacagtaagttgattttacaagctttattcaatttgattgaaaatgcagttaaacacacttctactgacaccaaaatcaatttatctattcgttatgctagcgatgaacaaatcgaatttgccgttatagacgaaggacctggaattagtttaaaagaacaacaaaagatattcgagcctttttacacaggatcaaataaatattttaaagataaccaaaaagaaagcatgggactaggcttatatttagtacagactatcctacacaaacatcaatcaaacctacaatataaaccgaaccaaccacatggcagtatattctatttcaatatagatacagactttaatgaaggagacatataatgcaatctaaaatattgataattgaagatgatcacgcaatcacacatttacttgatgttgcattaactttagattattacaatgtaactacagccgacaatgccacacaagcacactttaaaattcaaattgataaaccagatgtcattttattagatttaggtttaccagataaagatggattatgtttgatttcagaaatcaggcaacatactgacattcctatcattgtaataagtgcaagacaagaagaacaaacaattattcaagctttagataacggtgcgaatgactatatgactaagccttttaatgttgatgagcttcgggcacgaattcgagtcatagagagaatcgctaagtcacatcaagaaactaactttgtatttactaacggtttgctaagcatcgactttggctccaaatctgttgttattaataatcaggaggtacatttgacaccaaatgaatttagcttgttagaactattgtcaaatcataaaggaaaagtactcacttatgagatgatattaaaacgaatatatggctatgttaataagactgaaatgcctagtttaagggtgcatatgacatcattaagacaaaaactttcacaatgtcatgaggacgcaaaagatattattaaaacacatccacgcattggttatcaaatgttgcagtggaaagagaaataattaaataaaaaaagatcgctgccattaaacgaatgattggcagtgatcttttttatattcaacttattatttatcgcgcactagtgtcaacaaaatgccctattgttttttacaagaacatgatactgaaatttcataaagtttatttatgttcgattattcttaatttaagtagttgttatattctagattcatatttatatttaatcagaatgatattaccgcacacagctctcaattcaattaaatatttaacctttaaaacgttagtattttgatatctacagagaatcagttattgaaatcaaaaaagagctcaagacattacatcttcaagctcttaatctataaattatttttgatggtcagcaaatgtgcgacctttcataggtctgcttccaccgctgctcttctctttacggtcgaatttttttgtacttttcttcttacttgagtatccttttgaacgtttactcttactgtcaaatttaggattaccacgcttactatttctgttacgagaaccgcttggtttaccgttacggcctttgcgagataatggtttttcaaaagttaattgaacttcaacttcatcgttcgcttctactaactcttgtaaaagtgcagcaactaaatcaacatcgttatattcatttaacaactctgtagaaatgcgtttcaaacgtgattctgagtctttagacatccagttttcaactttttctttgatgtcatcttcacgtgcttgaagtacttctttacgatgtggtggacgaagtgcgctcatttttctaccattagcatcttcaatttgtctaatgtaatccatttcaattggatttacaaatgttaccgcgataccttctttaccagcacgacccgtacgaccaatacggtgtgtatagctttcagtatcttgaggtatatcaaagttataaacatgactcacaccagaaatatctagtcctcttgctgctacatcagtagcgactaaaatattaatttggtcatttttaaatttctttaatacttctaaacgtttcgcttgtgtaatatcaccatgtaagccttcagctttatatcctttagaaatcaaagcacttgttaattcatcaacacgacgttttgtacgtccgaatacgattgctaattcaggttgatgaacatctaggaaatttgtaaatgtatcaaatttctctaattctttaacaattgtatagaattcttcgatttgtggatcagacatttcattattcattgtcttaatgatttttggtgatttcataaattgttgtactaaagcttggattgctttaggcattgtagctgagaacaacattgtttgacgttgtactgctggaattttatccataataaatctcatatcatcgatgaatcccatattcatcatttcatcagcttcatctaaaatcaaagtatgaattccgtccgtttttaatgtgcgacgatttaaatggtcgataacacgcccaggtgttccgactacgatttgtgggccctttttcaaggctttaatttggcgttcgataggcataccaccgaatacagtaacaacttggacaccttgtccacggctaaattctcttaattgttcagctacctgcattgccaattctcttgtaggtgctaaaattaacgattgaaccccttgtttccctactactttctcaattaaaggaataccgaatgctcctgttttacctgtaccggtttgagcttgcccaaggatatcaattccttgtaacgcataagggatactgtctttttggataggtgtcggctctttaaatcccattgattcaagtgactgaaccgtattatccgaaatccctagttctttaaaattttgcaaaataattctcctttttacctgtttatttctcaatatacttttgcatataagttcattaatatttcatcaacttctatatagtaccaccaaaaaaatttaatcgcaataaagcaatttgcgaatatttattagaatcacattaattgattgtcatatttttgtcaaaaagctagcattagataagatgtaagcgttacgcatcattcgaataatcattataaaaaattttttataaaatacgtatatcgttaacattccacaacaaattttactgaaacacatgtgaaattagacattataatacaacatctttttgtaaaatattatataaacattcaaactacttcctatataaagtgtgtacatagaattaaccttgatttagtttcaaatttatagatttaacataaaaagaaaaaggcaattttgtatttacacacaaaaccacctcttctttgtaatcttttagtattaattcaaatcattttctaagtaaaaggtcgctcgactaatctctatgaaattaaagcatttacgacttcttctaacttcataccacgtgagcctttaactaatacacggtcatgcgcttttaaatcacttgttaaaacttctatcatatcgtctttagaattgaagtgttgtgctttttcgacatgttgctggcccgaatcataaatatacttcgcttcattaccaaacgtatacaacacatctatatgcttttcttctaaataattacctacaccgatatgcatttctttgctattttcacctaattctaaaacatctcccaaaattagaatgcgacgccctgtcaaagtactcagtgtatcaatagctgctctcatacttgtaggacttgcattataggcatcatttatcacagtgatatcattttctaatgtatgttgctccatacgcataccagttaagctgacattttttaaattttgatagattatgttatatgtcaaacctaattcatgaccaaccgcaatggcaatcgtcgcatttttcatattatgctttcctaatattggcagatcgtaatgttcattattaatcgtaaatgaaatacctgtagtatctctatcatcaacagaacaaactaatgcattatcagtagcaacaccaatactaatacattttgcattttcaacttctttaacatgcggttttaataatggttcatcgccatcatatataaacgtaccattatcttttagacctattgtaatttcagatttagctttagcaatcccctcacgcgaacctaaatcttgcatatgtgactcaccaatattagttatgactgcaatatctggttgagcgaggtttgacagaaattcaatttcatggaaacctgacatccccatctccaatattgatatttcagtatcattatctaattccaaaatagttaaaggtaaaccaatttcattattgtaattaccttgcgttttcttaactttaaattcggtatgcaatacactttcaatcatatctttagtcgttgttttaccattagaccctgtgacggcaattactttagggtttacatgtctcaagtaagcttgtgccaattgttgtaatgccgttaatgtgtcttcaacccatataataggcccgcttacattttcatctataggtgtgcctttttgataaaaagcagccccagcaccatcttgtaatgccttagagacaaagcgatgaccgtcaacattttcacctttaaatggtataaataacatatttttagaaattgctcgtgaatcaattgtgactccatttatctcttgatttaaaaattgatcttcaatttcacaaggaatccatgattgaatttgctttaatgtaacattaatcataataacaacctcagttagtcaattttgtatttatttttctgtttatcctggtgacgttctttagcaagctcgataagttttgtaatcaattctggataagataagcccatattttcccataattttggatacatactgaaagccgtaaatccaggcattgcatttgtttcattaatatatatttggttgtcttctgttacaaagaaatcagcacggactaaaccagaacaatctgtcgctttgaatgcctctaatgccatatttctaagcgttaattgaacatcttcgtctaagtcagctggaatttgtaattgaaccttaccatctttatattttgatttgtaatcgtaaaacgcgacatcttttacgacttcacctggccatgtcgcttcaggatagtcatttcctaaaactgctacttcaatttcacgtgcgttaacgccttgttcaataacaagcttacggtcaaattggaatgcttctttaataccttctttaagttccgcttcattattacatttactgatacctacacttgaccctaagttagcaggtttaacaaagactgggtaatttaatttatcatttactaattttaaaatgttatgttcatatttttcatattcagaacgtaagaaactaatataaggtaactgtggtaaccctcgatgttcaaataattgtttcattacaagtttgtccatagaacttgcagctgacaatacaccatttcctacatatggtacatccaatacttcaaaaagcccttgaatcgtgccatcttcaccattaggaccatgtaataatgggaatactgcatcgtatggttgtcctgaactactttctttcagtagctgtgaaatctcaagcgcctctccattttctaaatgaagctcatcagtagatttaatttcagttgtaatattattttgctttctccaatcaccatcattggtaatataaatgatatcaacatgatatttgtctttatctattgcatttaatacattttgtgctgtcagaatcgatacttcgtgttctgcacttttccctccaaaaacgatacaaatattttcttttgtcatttcgttttcctccaatgatatatcagggtttgctaccttaatataaattaatattgatttagtccaattgttaaatgatttattcgcatctttgaatcttaatagtatcacattttaatgctgttttgcattttaaaaacgaggcgttatgtgtctgtatctatgttgattcatttataatcagaacaatattcccttctattttattcctaattcaaattgaaatctatagctgatatcactgtgatattctagctaatttttaaaaagtcatgtaaaattgatataaacattagtgagtataaaaggagtttgcaatgaattattcatctcgtcaacagccggataagcattggcttcgcaaagtagactgggtattagtagccactatagctgttttagcaattttcagtgttctgcttattaactcggcaatgggcggtggtcaatacagtgctaatttcggtatcagacaaattttttattacattttaggtgcaatttttgcaggtatcatcatgtttatttcacctaaaaagattaaacattatacatatttattgtatttcttaatctgtctattattaataggattgctcgttattcctgagtcacctattacacctattatcaatggtgccaaaagttggtacacgtttggccctatcagtattcagccatctgaattcatgaaaattattttaattttagcattagcgcgtgtcgtttctagacataatcaattcacattcaataaatcattccaaagtgatttgttattatttttcaaaattattggtgtctcgttagtaccaagcattttaatattactgcaaaatgacctaggaactacattagtattagctgcaattattgcaggtgtgatgttagtaagtggtataacatggcgtatcttagcacctatctttattacaggtattgttggtgcaatgacagtcattttaggcattctatatgcacccgcattaattgaaaatttattaggtgtccaactgtatcaaatgggacgaatcaattcatggcttgacccctatacatatagtagtggtgatggctatcatttaactgaatcacttaaagctatcggttcaggacagttactaggtaaaggatacaatcacggtgaggtttatatacctgaaaatcatactgactttatcttttcagtgattggagaggaacttggttttatcggttctgtcatattgatcttaatatttttatttttaatcttccatctaataagattagctgcgaaaattgaagatcaatttaacaaaatctttatcgttggtttcgtcactttacttgtgttccatattttacaaaatattggtatgacaattcagttgttaccaatcactggtattccattaccatttattagttatggtggtagtgcgctatggagtatgatgactggaataggtatagtcttatcaatttattatcatgaaccaaaacgatatgtagatttataccatccaaaaagtaattaatttaaactattttgagtttcaaatatcataacttttcaagatgacattatataggctatttatgtcgtcgatttaaaatgtcatatatagatattactcgataataacaatccctctttgaagtacacattgtaaaatgtacactttaaagagggattttgttatatagtacttgctttcattttagtaaatccagtcaaaaaagctatcatcgaatagtccgacgatagctttaacggtgtgtgattcacaatcacagtcaattattttaattcgtgacttactttattagatgctggcaaagtattaataatgtctaaacgagatttagtttttttaatattcacacctaatgatgacaatagtttgactacattttgaatcttttcaggacgtttcattattatcacctcgtttggatcgctttcaatattatcttaccctattcgacatacctttactacatcatttacaaaatttttaatttattttcaaaattaaaatctatagcgcactctacattataccctaaaatacaattttgtatccttcatcataaatttctttttcaatactattcaaatttgctggtgtctcatacgataccgttacttgaccatcaattatattaatattcacttgatgaacacctatcatatttgaaatgcgttctgtcaattgacttacttgttcttctgtttcaattcccgctgtgtaaatcgtattttgatgtatcatcttaaactcctttagtctttaatcaatttttgaaaagtcactaataactcttccattgcctcttcctgagctccttgattaactttattcataatacaacttttcatatgttgttctaataactttatcgcaacactgtttaacgccgaacgtgtcgctcttatttgcgtaaggacatcatcacaatagacatcttcttcaatcatgcgattaatcgctctcacttgtccttcaattcgatttaaacgtgatttaagattcgtttttatttgttcagaatgatgtgcattatcttgttcagtcatagcattcactccttcatttacattccttactatactatatcccataaaacacaacgtcaacacaaagtgtgtttttcaaactaaattgtcatgatatttaaattgcttcatgatacaattaataagatatactactcgtttaagattttcgatgggaggtttcaaatgatagagttattatccattgcactcaagcattctaatattattttaaattcaatatttattggtgcatttattttaaacttattattcgcctttaccattattttcatggaaagacgttctgccaattctatctgggcttggttactagtcttagttttcttgcctttattcggcttcattttatacttactattaggacgacaaattcaacgtgaccaaattttcaaaattgataaggaagataaaaaaggattagagttaatcgttgatgagcaattagctgctttaaaaaatgaaaacttttcaaattccaattatcaaattgtaaaatttaaagaaatgattcaaatgttgttatataataacgcagcatttttaacaacagacaacgatttaaaaatatacacagacggccaagaaaaatttgatgacttaatacaagacatccgtaatgctactgattatattcattttcagtactatattattcaaaatgatgaattaggtcgtaccattttaaatgaacttggtaaaaaagcggaacaaggtgtagaagttaaaattctttatgatgacatgggttctcgtggactgcgtaaaaaaggcttacgcccgtttcgcaataaaggtggacatgctgaagcatttttcccatcaaaattacctttaattaacttgcgtatgaacaatcgaaaccatcgaaaaattgttgtaatagatgggcaaattggatatgttggtggttttaatgttggcgatgagtacttaggtaaatcaaaaaaattcggctattggcgagatacgcatttacgaattgtcggggatgcagtgaatgcattgcaattacgatttattctagattggaattcacaagccacacgtgaccacatctcctatgatgatcgttatttcccagatgtaaattctggtggaacaattggtgttcaaattgcttctagtggtcctgacgaagaatgggaacagattaaatacggttatttgaaaatgatttcatctgctaaaaaatcgatttatattcaatctccctatttcatacctgatcaagcctttttagattctattaaaattgcggcattaggcggcgtcgatgtcaatatcatgattcctaataaacctgaccatccgtttgttttttgggctactttaaaaaatgcagcatccttattagatgccggtgttaaagtatttcactatgacaatggctttttacactcaaaaacacttgttatagatgatgaaattgcaagtgttggaacagctaatatggaccatcgcagtttcacattgaatttcgaagtcaacgcctttatttatgaccaacaaattgccaaaaaattaaaacaagcttttatagatgatttagcagtatcttctgaattaacaaaagcacgttatgctaatcgaagtctttggattaaatttaaagaaggtatttcacaattattgtcacctatcttataaaatagaaatatggggagtgtaactttaatgcaacaatcagacatcattagtgcagccaaaaaatatatggaatctattcatcaaaatgattatacaggccatgatattgctcatgtatatcgtgtcactgctttagctaaatcaatcgctgaaaatgaaggtgttaatgatactttagtcattgaactcgcatgtttgcttcatgataccgttgacgaaaaagttgtagatgctaacaaacaatatgctgaattgaagtcctttttatcttctttatcactatcaaccgaagatcaagagcacattttatttattattaataatatgagctatcgcaatggtaaaaacgatcatgtcactttaactttagaaggtcaaattgtcagggatgcagatcgtcttgatgctataggcgctataggtgttgcacgaacatttcaatttgcaggacactttggtgaacctatgtggacagaacaaatgtcactagataagattaatgatgatttagttgaacagttgccaccatctgcaattaaacatttctttgaaaaattacttaagttagaatctttaatgcatacagatacggcgaagatgattgctaaagaacgtcacgactttatgatgatctacttgaaacagttttttacggaatggaattatcacgactagacattgaagttgtagtatgatgatgcgatgtaatgacgtattgttgcgggaacttggtgtcatgacatgttactttgatgtgctggtaccacgatgcgtcttgatgtagtgctatgatgtgctgttgtggaagcttggtgtcgtgccatgctactttgatgtgctgttgtgggagcttggtgttggtgccatgttactttgatgtgctgttgtggaagcttggtgtcatgccatgctactttgatgcgctggtactacgatgcgtcttgatgtagtgctatgatatggcgttgcggtgttatgggtggtatagcccgtggtattgatgccatgccgttacaattctatgatatggcgttgggacgttgcaatgtgtattatgccgttgtgacgttattatttcacactgttacatgtatttgtgaattgctgtggaaatgttgcgacatatactgctacactgatgaatcattgtgtcaagatgacattgcaatgatgaatagcaactctgttattaaccactttttacatgctgaaatctcgttaatattatttggctctatgtcaaattggactgatgcgttcaatatcggaagttaggcaactgaacattgcttaacttcctttttactttttggagcgtaaagttttgaacataataatattcgattgcgcaaatgattgtaacttccataaccaaaagatgtacgtttaattaattttattttgttatttataccttctaaaggaccatttgataaattgtaataatcaaatgtattttttataaagtatgcatgtttgttaagtgttttaattgctcgttggacaactgaatgcgtttgggataatggtatatgttttaattcgtgaataaagccttcataatcattatgtttaagtttgaatcgtagctgattgatatattggtaggcgtcatttaacgagtcatcttgatctaataaatacttgacgatacccttttgtgtcttccattccttaaataaagctactttacgatattcaaatgcccctaaatcttctccaggttttaatagtaatttcgcatatcttttaaacttattatataaaggttgattcgtcgttcttaattcattcataacagcgactcgaataccatttaaggcacgatttaataattgaacaatatggaatcgatcgatgactattttagcgttcggaaacatctctttaatcaatgtcatgtagccttcatgcatatcaatcgaaactgttttcacacgttttctagctttaagtgaaaaacgataaaaatactttttcaactcacttaatctacgatcttcaacaatatcaataatatgatgcgtttgtgcatcagcgtatataaaactcattttcccagaaacatttttaacacttttaaattcatccatcatgatatgttcaggaaatgcagaatacggcgattgatgaagcgattgagcggcttcatcaatgatacgagaaactgtagtagctgacacagagcaggatttcgctatagatttttcagaacgaatttctgctgctttattaagtacagctgatcgtgtttttttgatataaaaacagtatttatcaacttcaggtgtttcagctgtaaagtatcgttcgcacgttttacatttaaaacgttgcttacgcaacatgatataagttggatattcggagattttaggcatagtgattctagaagtcttagacccatttttgattaaattaccattaatgtttttacaattgcagtttgggcacacctcaggtgtatagattagttttgcgtaataaaagaaacactttctccctttatactcaattttctcaagtttaccgtcaaaaataatatttttatctttaaaatcaaaggtttttagtataacattattcataggcgcattatctcctttagttatttgtttagtcacttttaattatagagataattgcgctttttttatattcaaaatcaaaaaatcggacagatgaaaagtaaaaaactttttctatcagtccgatttattatagaaccatattatttcaaataaaaacagcagtaggatgactttcacatttgaaatcatcttactgctgtttctatttatcacatattgtataatgtgacactaagtttcgctattgaagcgaaaaataatgtgcgccctataaagttaaaattatcttcaacttttagggggcacattatttggacttgctaaggttatttctttttctttttagacactacttgtgtgtttttgccttttttattgttgccgccgttgtgctctctttcatacgcttcaatgaaaggctgtacttcttttttagcgactttttcataataaatgttcgcaaagtgtgtttgaactacaaggaacgccgcactgactgaccagtacaaaccaagtgctgatgctgagcttaatgaaatccagataatcataattggtgaaatgaccatcatcatgtaacccatttgacgttgttcgtctggcatcgttttacttgatacatatgcttgtataaagtataaaacaccggcaataattgtaatccaaatatcaggacgtcctaaatcgaaccataagaagtgtggatatttaaacaaaccatctacaagttggtctttaagtacaaagtataatcccatgatgattggcaattggattagcattggtaaacaacccaacatactcttaatcgggttcatgtcatactttttatatacttgcattaattcttggtttgcagccattttttcttcttgtgtacgcgcacgtttcactttttcttgaattttttcaacttctggctttgcaactttcattttttgacgcatcatatgactatttttatagtttgacaacatgaatggtaataaaataatacgaattaccaatacaaggataataatagctaaaccataattgtcgtttaataagttatttcccaaccaatccaatacatttttcattggatctacgaatgtattgtagaaaaacccactacgtttttcaggtttagaatagtcacaaccagccaaaaagaccataatacctaaaaataatggtagtaacgcttttttcttcatttttccacctctatcattatattcacataggatttattctatcacattaatgagtacgtatgaaacaataagtggaaaaatttaactaattattaaaaaaatctttgaatcgattaacagtcttttcaatattttcacttttagaaatggctgaaatgactgaaattccattggcacctgcttctacaatcggtgccacgttactagtgtttataccgccaatagctacaatcggtagttgcggattcatttctttaaatgttgcaatcatttctggacctactggtgtatgcgcgtcatttttcgacggcgtaggatagattggtccaacacctatataatcaacatgagtcaaatcagattttgcatactcacctaaatcactaatacttagtccaataattttatcagtgaaatattgtgctatctctttgactttcgcatcatcttgaccgacatgtataccatccgcgttaatttcttttgccaaggatacatcatcattaacgataaaaggcacatcatattgatgacagagatgctgtaattctttagctaatacaagtttatcgtttccttttaaagctgattcacccttttctcgaaattggaaaagtgtaatcccagcctttaatgctgcttctaatacttcatgaatagttcgatgactcggaacatcggaggtcccacaaataaaatatacatttagataagattggttaaacatactattccacctcttgaatgcgaatccgttgttgataggttgtttcatttaaatgatataacgtatcaagcaacaatggtgaaaacgtaccaggaccaccacaattttcattttcagcagctacctcagcagcaatattaaatacgcttaccgcttcaattaacgcttctatgtctggttctgtttctctaaataaaaatccagcaataacgcctcctaataaacaaccagctccagttactcgtgctaataatggagatccattagctaatacgatggctttatcaccttgaacaataacgtcctctttacctgtgattactattgcagttttatatattgcgtaagcctttttcgctattgcaaccgcatcaagattagcatcactatctgtacctttcatagttgctgtatcatcaatcaacgctaatatttcagatgcattgcctttaattactgatactttcgctgatttcaataataatttacaaaattgctttcgatatgtagaagcaccaacagctacagggtcaaatacaataggtaagcctgcctcatttgctgtttgagcaatcgcaataatatcttgttcattttgtgctgttaaagtaccgatattgattaatagcgcttgtgcaactttgtaaaattcttcagcttcttcaggagcttcactcattgcagggctcgcaccaatacttaataaaccattcgctgtaaaatttttaactacatcgtttgtataacaaattgttaatgggttttcaatacgtattttatttagataattcatcgtctaatccctctttctttaaatatgcaaaatgattcactggacctctaccacgaccgatttcaggcgtatattgtatactcattgaaataaactttttagccttctgtacagcatcaaataatggtctaccttttgcaagttctgccgttataactgctgaaaatgtacaccctgttccatgcgtatgttttgttttaaatcgttcattttcaaatgtttgaacaccttctttagtaaataaataatcttttgctatatcagtatcatttgaatgaccgcctttaacgatgacacctttactaccaatttcattaataaagatgcggccagcctgcataattttttcttcactatcaatggttagtcccgttatttcttcagcttctggtaaattcggtgttactacatcagctaatgacaataacgtatgctgcaagttttgctttgtgtcattatccattaatgaatcaccgcttttcgccaacataacaggatcaattacatatggaatagattcatgttgcattaaataatgacgaatcgtttccatagtatctgctgtagcaatcatccccgttttaatagcatgcggtaaggtatcgttgaagacactatcaagttgttcatctacccattgatgatttaaattatgaatattttgtacgcccaatgtattttgagcaacaatacttgtaacgacgcccataccatatacaccacatgaatgaaatgattttaaatcagccattacgccggcaccacctgttggatcagtacctgcaatggttaatgctattttaggtttaatcatttacttttcctccaaattcccattgttctagtgtcatagccatattgaaaaatcgacgctcatgtatgcaactttctaaaaatacttgctttacttgttccaattccttgtcagacattgattcggctaatttattcattaatgactcaaatacgttaattatgtcatccatttcagtactataaaaatcaaaccattttgccgtatctttttctctattaagcttatgatcactttgagagcgcttagctaattctgcataaatatatggacaaggtgccattgcagcaattgtataaatagcattttcacgactatgcgcttggaaatacatatgttttatgtaatggtcgccacttggaggccaaacttttgttttaatgatttcttcgtatgattcaccaacaatttgcgctaaaatatcatgcgcaagtacttcaccctcaaccataaattctatttgctctactaaaaattttacgtcattcatgctattcatttttggaattaacaaagcatataagtttgtaaattcttttaaataagctgcatcagcttgtaaataatgacgtaatgcatcagcttgtatattgcctaataacattttttgaataaagtcatcctcataaatatcattaatgattggctttgcagcttggtacaatttttgtgaaaattccattgtaaaaaatcctccctaaataaaaaaactacttccaacatgaaagtagtctgatggcaatgttgctatactagccccatcacttcaataactactttcctacgttggtactaaccaaatcaggtcataagggtctgaacagttcatctcagccatattattaggctcccctagtagttccttagtattcaattgcaaattaatcttagcaaacggtttcaacattttcaattattgttgctcagttgtattattatctttaaataataattctataattatacatatttgcgaaataaaaaagaccggaacatatcgagaattccccgatatattccaatctaaaagttacttatataactattggttagttatgcataaatggcttatgcagtaacccaatgtccagcgccaccagtgttatataattttactgctgcggcatcttgaacactttcaggagcatttgctggtgatacacctttgtatttagcaggtgctactgaatcccaagttgattgtaagaattgatacttaccagctgcacctgatgttggatttacagcatgaatattgccacctgattcacgttgagcaatttgttttagatgatcattcacatttactgatgaaccttctgatgcttttgattcagttggtgttgcagtaacttgtgaattgtttgatgttgatgcttgtggttgctgagtttgagcattttgtggtgcttcaacttcttgtgattgtacttgattagcttgatcagctgatggtgcaacattattagttgcaggtgcttgtgcactcatgtctgctccattagcacctgttgcatggtaattccaagcaaagtgtgtaccatctgattcaaagtgataagtaaacccttcatagtcaaatgtataattataagcgccagcttcaattggtttttgatttaatgtttgatcatttgattgcgccatttgcgctaaagatgctttatttaagtccgcttcacttgcatgggcttcgtgacctgcatttcctgctacgattcctaaacctactgctaatgatgatgcgagtaatgttttcttcataatcttaaaatcctcctacaagtaatttgtttctctaaaagttttacagagactactgtaacatctgtaaaatccatgcaggttacaacaaaataaaaaaatagccttgttttttacacagtgattacaacgaaatcccccataatttcagatatgattctatcgagaattgtcatgacagtaaaaatgtttttcatttgcaattttttatgtaatcgttttgcaatctatgtctattttctattagaaaaactacacaaaaagacgacctacacaacagtactagtcatgtaagtcgtttttaagtgagtatatttcaagttaattagatctataaaaaatttaggatggattaaatgtatattaaggatgtttaggataattggatttaaatttctaataagtcatgattatctatattttgagagtcaatatctaaaatactatctgagagaatttcattattttgggatttaggggacataaattttattgtttcaacatataattcagtgacaaagtgtgtttgtccgtctttatcatactttcttgatctcatttgaccagttataccaaccaatgtaccttgattagtgtatttttctatattagaagctaacttgccaaatgctttacagaataagtaatcacagacgatttctccattttcatctttataatttcggtgcgttgcaacacaaaacgttgcaatttttctatcctccttttcaaatatttgtgcgtctttcgtcagtctcccgacaattacgattttatttagcatgtagtgtgtgattcacctcctatgcctatatcttaattactagcttaaaaatggtcaaaatggcaaattttatataattaatagctatagcatctcgttatttgttatatttaaagaaattagtcatgaaatgaccttaaatcttctaaataattcaaaaatcataaatattaaactaatgggatgtgggaacatgaaaacttttaaagcagtaaggtttcaaattgtgaatgaacacggcagaattatagaatatgaattagaagatggtgtaataattaataaagaggaaagtggcacgggttggctgcttgaaattgtcatttctaatgagcattatgaaacatttaaggaatatcaagacaatgaacagttattggatattcgtgtcgtcatcacgcgtccagccaatgatccagctttatttgaatctactgtgaaaagtattaaaaattttaaaacaacaatgtctatcgtatttgaatgtcatatttacactttacgtcaacagtatgctgaaagtttattagaacaacttattgatgatggattatctggtgaagaattaaaaaaatcatttaatcgaatgatgcagtctaaaccaaagttaaaggatgaaaaattagaagagtaaaataaaaaacattcaaagattatgccaacacattaaatctttgaatgttttttgttttattttacatcttgaattgcaaatgtaagttcacaactacaagcaagttgaccatcgacagtagctttagcattacctttaccgattggtcctttaattttagtgatttctacttccaacgttaaagtatcaccaggtactacttgacgtttaaaacgacatttatcaataccagcaaataaagcgattttacctttattttcttcactatttaaaatagctaccgcacctgtttgagctaacgcttcagtaattaatacgcctggcattaccgcatactcgggaaaatgcccttgaaaaaatggttcgtttcctgatacttgtttaatagccacacaacgttgaccttcttcatattcaactactttatcaattaataaaaatggctgtctgtgaggtataatttgtttaatttggttataatcaaaaattgtttccatggttgaaatcctccattatattaatttactgaattaatcgttaatacgttcaatgtctgcacctaattgcttcaatttaccgtgtaagtcaacatagcctctatctaggtgcgttaattcagtaacgcttgttttaccatcagcaactaatccagctaaaattaaggcggctgctgctcttaaatcagtcgctttaacttgtgcaccttgcaattgacttttaccttcaagtttagcactacgaccttctacattgatattagcattcatacgtttgaactctgcaacatgcataaaacgattttcaaatacagtttcagttactactttatgtccgtttgctgttaataataatgccatcatttgtgactgcatatcggttggaaaaccaggatgcggtaatgttttgatgtcaacaggctgtaaatctccttcagcacgtacacgaataccatcttcttgatattccaattcaacgcccatttcttctaatttatacactaaactagccatatgttctttgattgcaccacgtacaaaaatatcgccacgagtaatggcaccagcgatcagtaatgtgcctgcttcaattctatctggaatgatagcatgttctacaccatgtaatgattctacaccattgattgtaattgtgtctgtaccagcaccagtaattctaccgcccatttcattaatgtagtttgctaaatcgacaatttcaggttctttagctgcattttcaattaaagtcttacccttagctaatgatgctgccataataatattttgtgttgctcctacacttggaaaatctaaatgaattgatgtaccttttaatccatctttagcattagcataaatattaccattttcaagatgaatttctgcgcctaaagcttcaaaacctttaatgtgttgctcaatcggtctacttccaattgcacaaccaccaggcaatgcaacaatagcatgtcctagtcttgctaatagaggtcccataactaaaatacttgcacgcattttactaacatattcatatggtgcctcttcatttagagtctttgttgcatcaacgacaacagcattttcgtcctttttgtatgtaacgtcagcgtttaaggttgttaatacattatttattgtttctacatcacttaaagctggaacattaactaatttgctcggtttatcagaagctaataaagatgctgttaatataggtaatactgcatttttagcaccttctactttaacttcacccgttaatttatttccacctttgattactattttatccatcgtaaatcctccacttagaactcctattactttacatttccctattttaaaattattttaagtcattatttaattatatctagttttgattacaaatcatagagttagacttattttattaaatattttacctgcgtcgagtattgtaacaaatctacaataaaattgcttactgcagtgcctaataaaatagcaacaaatatcatacacacttgtaattgagtggcgtatccttttttaaaaaattgatctaatctaattgattgtaaagcccaataggcaatacaaatacatacaacatgtaacactaaatggataactgcatattgtccgatataatccattttatcacctcataagattactgtattacattgtacatgaaaaatttaaataatgatacaaagtttaatacccgtttttagtaaagtttaagctaacttactatataattctttttacataaatatcataactataaagtatcttggcatggaaaaatgtagctactttcaaaaaagaaacgtcgactgtagatagtggtgaaaggaaattttgattttagcaatctattagtgattgtaaaaagtaaaactattcttgagagtcagacataaatcaatgtctagactctatagtgttatatttggcagtagttggcggggccccaacataaagaaattggaacaccaattcctacagacaatgcaagttgggggcggggccccaacacaaaagctggcggaaagtcagcttacattaatgtgcaagttggggtgaacaacgaaataaattttgtgaaaatatcatttctgtcccactccctcctatttttaaatacacattagctgtgtttaatgataaagaaccactacatcataaatctttaatggttctttatcaattccttccccactctcatgttttgtatctttaaattaatataattcaaaaaagggtcgaagatatgaaatcacatcttcgaccctttatttactattttaattcagccacacgcaaacggttatttgctctctctaaagctctttcggctctatgaatatcagtattgtcgtcatcattttccaagtgagactctgctcttgctttggctaatttagctctttcaacatcaatttctcttgcagtttctgcagtctgaacaatgattgaaactttatcttttctaacttcaacaaagccatcgcttacagcaatatattcagttccatcgtgaaatttcacttttacaaagcctgtttttaaagcagctacagttggaatatgtccactcatgacacctatctcaccagctgttgtttgcataacaacgagttcaacattatcacgattgtaaacagaaccattaggagtgacaatatctaggtttaatgtattcattatccattcctcctaattgttatacttcaacacccatatctttagcttttgcaataacatcatccatgctaccaactaaacggaatgcatcttctggaatatggtcatatttaccatctaagatatctttaaagtttgcaactgttgtcttaacaggtacataagaacctttttgaccagtaaattgttccgctacgtggaagttttgagataagaagaattgaattctacgtgcgcgttcaactgtttgtttatcttcatcagataattcgtccatacctaagatagcaatgatatcttgtaattcacggtatttttgaagtgttgattgtacatcacgagctacttcataatgttcttgacctacaattgatggttccaatgctcttgatgtagacgctaatggatccacggctggataaatacccatttcagttaatttacgttctaagtttgtagttgcatctaaatgggcaaacgctgtcgctggcgctgggtcagtatagtcatcggcaggtacgaataccgcttgaatagaagtaactgatccttttgttgtagacgtaatacgttcttgtaattgtcccatttcagtagcaagtgttggttggtaacctactgcagaaggcatacgacctaataatgcagatacctcagaaccagcttgtgtaaatctgaaaatgttatcgatgaataataatacgtcttgaccttgttcgtcacggaaatattcagccattgttaaaccagataatgcaacacgcatacgtgcaccaggtggctcattcatttgcccgaataccatggctgttttcttaattacaccactgtcactcatttcgaagtataaatcgttaccttcacgagtacgttcacctacaccggcgaatacagaaataccaccgtgctcttgagcgatgttgttaattaattcttggattaatactgttttacctacaccggcaccaccgaacaatccgattttaccacctttaatataaggtgctagtaaatctactactttaatacctgtttctaaaatttgaacttctgttgaaagttcatcgaatgctggtgcttgacgatggataggatcgcggcgaacagaatcactaatttcttctttaaggtcaattgtttcacctagtacattaaatacacgacctaatgtttcgtcaccaacaggtacactaatttctttgcctgtatcttttacatccatgcctctttggacaccatcagttgaatccatcgcaattgtacgaacaacgtcgtcacctaattgcagcgcaacttctaatgttagttgtaatgtaccttcttctttaggcacatcaataaccaaggcgttattaattttaggaacttcgttatgttcaaatcgaacatcaattacaggacccataacttgagttacacggccaattcccatgctattttcctcctttaaatattattcaagcgctgcggaaccaccaacaatttcagtaatttgttgcgtaatttctgcttgtctcgctctgttatattctaatgataagtcatcaataagttcagttgcattatcagtggcatttttcatcgcagtcatacgtgttgcatgctcacttgcttttgcgtctaatattgttccgtaaatcaaactctcaacatattgaggcaagattacacttaagatagattctttatctggctcaaattcataagaagacaaatgaccatgtcccttactagaatcctcttgagataatggtaatacttgtctagatgtaggcttgttttcaagaacgctgacataatgactatagtatatatttaattcatcaatttcttcttcactgtataagtctatagcatggtttgctagtgcttgaacagatttgaaagaaggttgatcaggtacgtctacttgagaatactcaatgtcataacctctattttttaggaaatcaacaccttgttgccctaaaactacaatactgtattcgctactatcttgatgtttcgcttcaatatcagtaatcaattttttaagcacgtttgcactatatgcacctgctaaacctttatcactcgtgataactaaatatccacttctagtaattttacgaggtcttagcattggatggtttgtattgctacttgcccctgcaactgcagtaattgcatcttgcattttatccatatatggtgtgaattgttttgtatttttttcagctctacgaagttttgaacttgataccatgttcatcgctttcgtaatctgcttcatttttttggttgattttattcgagtatctatttctttaagagaagccactatctcaccaccttatactaaacttgtttattattcagatttgctaaagctttttttgaattcgttaattgctgtgtcaaacttctcagcatctggtaagccaccagtttctctgatttcatttaacagttcagtagcatttgattctgcccagtggtttaactcgtcttcaaaacgtgtgatatctacaactggaatatcatctaaatatccttttgttaatgcataaataatcaacacttggtgttcaactggtaatggtttgttttgatcttgttttaagacttcaacagtacgtttaccacgttctaatttacttgcagtaaattcatcaaggtctgaaccgaattgtgcaaatgattcaagttctctgtatgacgctaagtcaagacgtaacgtaccagcaactttcttcattgctttaatttgtgcagatccaccaacacgagatacagattgtccggcattaatcgctggtcttacacctgagaagaataaatcagattgtaagaagatttgtccatctgtaattgaaataacgtttgttggtacataagctgaaatatcaccagcttgtgtttcgataattggtaatgcagtaattgaaccgccacctaagtcatcgtttaattttgctgctctttctaataatctactatgtaagtagaatacgtcacctgggtatgcttcacgacctggaggtctacgtaataataatgataactcacgataagctgctgcttgtttagttaaatcatcataaacgattaaaacatgtttaccgttaaacatgaattcttcacccattgttacacctgaatatggtgcaatatataataatggagaaggttcagaagctgatgctgctacaacaatagtgtagtctaaagcgcctgcttgtcttaacttttcaacatttgctcttactgttgaatctttttgaccaatagcaacatagatacaaattgtaccttgatctttttggttcaaaattgtgtcaattgcaattgttgttttacctgtttgacggtcaccgatgatcaactcacgttgacctctaccaattggtactaaagcatcaattgctttgatacctgtttgtaatggctcatctactgatttacgatccattacaccagtagcttttttctctactggacgtgttttagttgtgttaatcggtccttgtccatcaataggttgtcctaatggattaacaactcttccgattagttcttcacctactggtacttccatgatacgaccagtacgtttaacttcgtcaccttcagtaatacctgtgtatggtcctaaaataaccacacccacgtttgactcttcaaggttttgggctaaaccaagtacgccgttatggaattctactagctcaccagccataacgtcatttaatccgtgaattaatgcaataccatcaccaatttgtaatacagtacctacatcagttacggacatttctgactcataattttcaatttgtgagcgaagtaatgcactgatttcttcagcttttatggccatctatgtcactcctctttataattaattaactcttctaaattttctttgtaattggacaagatcatttctaacactaccatctaatacagttgtgccgactttaactctaaatccaccaattaaatctggattaatttttgtatctacaataactttagataacttcgtttgttgagttactagtttgacaatcttatctaactcttcttgactcaattcatatgttgactcaattgttgcaaaatcttgattgtagtgtccgttatataagctttggaacgccttgaatacgtcagctattaatgagatatgtctattatctgctaacacgtacatcatatttttaatgtatggattaatgtcagtaaatacaccattaatcaactcacgacgttgttctgctgtttgagttggattactgtcaaccattttcaattgctcaattttatcttttactgcttcatttataactgttaattcttcattaatagtttctaaattgtttgtatctaatgacacgtcaaataatgctttagcatacttgttagctacttttaccattatttatcgcctgcctcttttagatacttgtcaaccaatgctttttggtcttgttcagaaatttcttttctaagaactttagaagcaattaacactgatagttcagatacttgattattaatatctgcaatggcacgttctttttggctattgatttcactttgtgctgtttcaatcataccgtttgcacgtacgtttgcttcatgaataatttgttcttgctgttgacgtgcttgaaccttagcatcttctaaaatcttttgaacttcttcttgtgtttctttaagtttttgtttattttcttcttcaagtttctgtgcatttaacttagcttgttctgcgtcatcgatatctctgttaatatctctttcacgtttatccattacatctttcaatggaccccatgcgaactttttaagtaacgcaagtaacacgatgaaagttaggacctgtacaatcacagtaccccactcaacgcctccagctgcaccaagaacgaataagttagctgtttcagtcacgggttcatgacactcctttcattaaaataatcgctagtgttatatagaaaaaacgacgaggttaggacctactgaatttatgcgataggcatggtgcgttcatatctcaactatttaataaagttcaaagatattactatatatggcatcatgaattatgtcctatgcgctttgtcccgacctcttttatctgttaattatccagcaaatgtcatgaatgcaattactacaccgatgataggtaatgcctcaactaaacctacaccaatgaacatgatacccattaattgaccacgtgcttctggttgacgtgctacaccttcaactgttcttgaaacgattaaaccgttaccgatacctgctcctaatgctgataaaccaattgcgattgctgctgcgattaaattcataatttaatttcctcctatgattgtatataattattgaaatttttagtgttcatctgccactttatgtgacatataaaccatcgaaagcataataaagatatatgcttggattgttcctacaaatattgaaaatgcttgccaaacaattaatcctgggatactaataatccaaccccatgctggttcgttaaagaataagccagcaagtaatgttaatagtatctcacctgcaaatatgttaccgtacaaacgcagaccaagcgttaatgttgaagtgaactcttcaaaaacattaataattgccaatggccaaaacggctgtacataacctttaagatattgtttcgtaccacgcattttaattccataaaagtgagttaacagtattatcgttgtagacaacgttaaagtcactgttgcatcagctgttggtgatttccaccacaatgtgtgatctttcgttactatagaaaacggaagacctaacatattagctataaaaatgtacagaatcagcgttactgctaagaagtggaattgaccaccttttttccaagccatgttaccttcaatgattcccctcacgaaatcaaaaatccattcaacgaaattttgtttgccagttggtctttttttcaaattacgcgtacaaatgatagcaagtagaaaaacaagaaacgccgtaacaagtatcatcaatatacttgataaattgaaaacgatatcaaaaccgaataaattccaactcacgagcggggatttgtgatccataatctcacctctttcttaatttatttgctcacctttagtaaaggacgtatgataactacaacatatgaaatcattaaaccaataattataccgattatacttacatgcgatttattaaagtaccaaatcatacaagcaataattgcaactaagtatcgccacatatttccagttgaaatatgcatagtgtctggtcttttagctttggctaagtagctctcaaatataacagtattgattgcagaaccagtaacaccaatgattaatcctaagataaatgcatggtgtgtaaaaaggtataatcctcccaatattattaataaatacaaataatattgaatgaactgtttaaaaatgttgtagaaacgactcattttatatgcctccgtgtgactgatatcaatcatgaaaaccgttccactcatacaaactaaatgataatataggcgatttgtggtgtcaattctattcaaattgttgtaaaaaaataagcatgttcagacacaatttagacacatttagacaaaaagtctatttttctcagaaatcgcttggtttttcagtgattaaattcaaataatacttaatatgattaactattctttctgaagcaaatccatcaccgtaaggattagatgcttcagacatttgatgatataatctctcatcatcgattaattcttttgcagcttgatacacattttgcttatttgttccaatgacttttaatgtgccagcttcaacaccttcaggacgttctgtaacgcttcgcaaaactaaaactggcttattaaatgatggcgcttcttcctgaattccacctgaatctgtcaaaataaaataagattttttagcaaaattatggaaatctactacgtccaaaggttcaatcaattcaattctgtcatgcccccctaaaatcttatgagccacatctcggacttttggatttttatgcattggatatactaacgctaaatcggtgtactcatctatcaagcgtctaactgctttaaatatattttccataggttgacctaaattttcacgacggtgtgctgtcataagaatgaactttttgtcatggtatttatccatgatgttagatttataattgtcatcaactgtatatttcatagcatcaatcgctgtattaccagtgacaacaacactttctgaatatttcccttcatttaacaaatgcgatgcagcatttttagtaggtgcaaaatgtaagtcagctaatacaccaactaattgtctattcacctcttccggaaaaggtgaatatttatcataacttctaagccctgcttcaacgtgtccaatcggcacttggttataaaatgccgctaaaccacctgcaaatgtcgtcatcgtatcaccatgcacaagtaccatgtctggtttttctaattgaatcacttgttctaattgagtgattgatttagaagttatctcagaaagtgtctgtcctgatttcataatattcaaatcgtattttggtttgatttcaaaggtacttaatactgaatcaagcatttctctatgctgtgctgtaacaacaacaattggctcgagcattttttcttgttccaaagctttaactaaaggagccatctttatggcttcgggtcttgttccaaatatggtcataatctttttcatcaaactacttatctccgattcttctatttagtaccaaacaatctatctccagcgtcgcctaaccctggtgtgatatatgctttgtcatttagcttttcatcaagtgcagcaatataaatatctacatctggatgtgcttcatgcatcttttctacgccttctggtgctgcaattaaacacatgaagcgaatatttttagcgccacgtttcttcaatgaagtaatagcttcaattgctgatgcgcctgttgctaacataggatcaacaacaatgatttgtctttcagtaatatcttgaggtaacttagcaaaatactctacagcctttaatgtttcgggatctcgatacaaaccgatatgtccaactcttgctgcaggtactaaacttaaaataccatcagtcatacctaaaccagctcttaaaattggaacgatagctaattttttaccagctaatcgtttagccgtcattttagttacaggcgtttcaatatcaacatcctgaagctctaagtctctagttacttcatatgccatcaacataccaacttcgtctacaagttctctaaattctttagtacctgtatttacgtctctaatatagcttagtttgtgttgaattaatggatgatcgaaaacgtgtactttactcataaaaattactcctatctttgtgtatgtttattgatatagaggatattcagctgttaatttcgcaacgcgttctttagcttgttgtaatttttcttcatctttactatttttcaatgctaaactgatgatttttgcaacttcctcaaaagctttttcatcaaatccacgcgttgttgcagcaggtgtacctaaacgtataccactcgttacaaaaggtttttcttgatcgaacggaatggtatttttgttacatgtgataccaactgaatctaaagtctcttcagcttctttaccagtaagtcctatagacccttttacatcaacagctactaagtgattatctgtaccgccagaaacaattctaaatccttcattaattaatgtttctgcaagaacttttgcgtttttaaccacttgttgttgatacattttgaaattattttctaacgcttctccaaaagcaactgcttttgctgcaataacatgctcaagaggtccaccttgaataccagggaaaattgttttatctatgtcttttttatattcttccttacataaaatcataccaccacgtggtccgcgtaatgttttgtgtgttgtagttgttacaaaatcagcatattctactggatttggatgtaaacctgccgctactaatcctgcaatatgtgccatgtctaccattaacttagcgtttacttcatctgcgatttctttaaactttttgaaatcaattgttcttgaatatgctgatgctcctgccacaataagcttaggcttatgctctaacgctaatttacgaacttcatcataattgattcgttctgtgtctttatctactccatattcaacgaaattgtagaatttaccactaaaattaacaggcgctccatgtgtcaagtgaccaccatgactcaaattcatacctaaaactgtgtcgcccatttctaatgcaactaagtaaacagccatattcgcttgtgaacctgaatgtggttgaacattgacatgttcagctccaaacaatgctttagcacgatcaattgcgatgctttcagttacatctacaaactcacagccaccataatatcggcgtcctggatagccttcagcatacttattagtcaacactgaaccttgtgcttccataaccgcttccgatacaaaattttccgatgcgattaactctatgttgctattttgtctctgaaattctctctcgattgcttctgcgataactttatcttgcttggtgatataagacataaaatctccccttctttcaaaaaaacttattggtatttagcacgttcgccaccaatctttttcggcctagatgtggcaatagttacaattgcctgtcctacttgctttactgaggtccttacaggtacacatacatgtttaatatgcatgcctattaatgtttgaccaatatcaattccacaaggaacagtaatatgttcgaccacgatcggatccttcatatgctgaaaagcgtatgttgccaaactccctccagcatgtacatctggaacgacggaaacttcttccattgttaatggattaaactgagatttttctattgttatcgctctgttgatatgttcacatccttgaaaagcaaaagtaacgcctgtctctttactcacaacatctaatgcattaaaaatagtttccgcaacttccatcgaaccgacagtccctattttttcgccaatgacttccgatgttgaacatccaattaaacatatatctcctttattaaaaaaggacatatcttttaattcatctaataacattgtcaaatctttcataaaagcccacccttcctaaaaataaaaaaggaatatagcaaagtgctacactcctctattataacttatttaactgttaacatatactaattatacagaattcctactagcaaataatatcttttaattttaaaatcaaacttacaagttcttcataggtatgtacatacatttcttttgttccgccgtatggatctataacttctcctacttcttttacatattcatgcaatgtgaaaacatgattttgcaaaccaaagtgtgcctctattaattctttgtgcgaatacgacatcgtcaaaataatatctgctttcaaatctgcttcagtaaattgttgcgataaggtcgttttagctaaatgatgttcttcaactatgtcttcaacataattcgaaacaccttgattgttcacagcgaatatacctcttgattcaaattgatgatttggcataacctcttttgcaatactttccgctaatgggctacgacatgtgttacctgtacaaacgaataaaatcttcatagttcacaccctttaataatgtgattacctgcagcttttaacatgcgattcataattgcttctgtattatcattcagctcaaagccgtatatatacgccgctgaaatattttcattttcatcaagtgaatgtaacacatcataaagattatgacttgcttgtttaacatcattgtcatcctgacataattgaataaattgcgcttcacttggtataaacgtcaccttattactcggcacaataaaagctatagaagaccaatctttaccgtcatttccaattttgctctcaatgtctgtaataattgtaagtggtgtattgggtgagtaatgcttatacttcatacctggtgcaattggctgttcagtatcattataatcagcatgagtgatactattcggaagtatatctgtaatcattgctgctgttatagaaccaggtcttgcaattttataaggaaaagatgtgcaatctaaaaccgtactttctaatccttcttcactttgttcagcttgaacgataccatctatacggccattcaaatcttgatatacatgattgaaagttgttggtgaaggtctaccacttaaattagcacttggagcagctagaggttcatttatgatttgtaataattgtctacctacagaatgacttggcattctaacagcaactgatgataaccctccagaaacttttcgacatagatagcctggctttaacggcaatataaacgaaatagggcccggccagaatgcctgcattaacttttctacgcgtgcatctaaagtatatgtaaaatcttttaattgatctttactgtgtatatgaacaataagcggattatcagatggacggcctttagcttcatatattttagctacagcttcttcatctgtcgcatttgctgcaagtccataaactgtttcagttggtaaacctattaaaccaccatttaaaacaatgtcttttaattcatttattttaggatattgctgtaaatcttcattatattctctaacatcccaaattttagtatccaacttaatcacgcctttcttatttatcataatacaaagtaaaaagctatgcacttaactaatcatagcaaaggcataacttctaattaccatttaaatgagacgattcgatcgtggccatttatatctttaataatgtcgatttttttgtcaggaaatttatttaaaattattgatttaagtgcctcaccttgattgtaaccaatttcaaaaacaactgggctgcctttttccataacgtgaggtaaatcttcaatgattgattcataaatagcatatccatggttatctgcaaacaatgcctgatgtggttcgaatctcgtaaccgttggagacatcgtaaccatatctttttcatctatatatggtggattagatatcaagccgttcaacttgataccttctttaattaagggctttaatgcatcccctgtcaaaaattgtatttgtgattgatgcttctcagcattattacgagccatattcattgcctcaagtgaaatatcagtagcaataacatttaaatccggcttttcacatttcaaagtaattgcaagtacaccactacccgttccgatatctacgattgttgcatcatcttctaactgttgtaagaaatgcaacattacttcttcagtttcaggtcttggtatcaaacaatttgagtttacatcaaatgttctaccataaaatgaggcaaagccaactatatactgtataggctctcctaataacatacgttgtaatgctaagtcgaacttcataatcatcgctttcggcatatcatcatgcatgtggactacaaagtccgtacgcgtccattgaaatacatctaacattaaccattcagctcgtgtttgttcaaaccctttttgttgagttaaatgaattgcttcatctaacttttctttataattcaccattattaagttctttcaatttatctgtctgctctgataaagtcagtgcatctataatttcttctaaatggccttccataatttgccctaatttttgaagcgttagacctatacggtggtctgttacacggctttgtggataattataagttcgaatacgttctgaacgatcaccagtaccgactgctgatttacgttgtgacgcatacttttgttgttcttcttgaactttcatatcgtataaacgtgcttttaacactttcattgctttttcacggttttgaatttgagacttctcagaagatgttgcaatgacaccagttggtaaatgggtaatacgtactgcagagtcagttgtgtttacgtgctgaccacctgcaccacttgaacgatacgtgtcgatttttaaatcttcatttctaatttcaatttctacatcttcaacttctggtaaaactgctactgtagctgttgaagtatgaatacgtccacctgattctgtttcaggcacacgttgaacgcggtgcgcaccattttcaaatttcaatttactatacgcgccattaccagaaactgagaaactaatttctttgtaaccaccatggtcactttcagacgcttctactatttcagttttgaatccttgtgattcagcatactttgaatacatacgcattaaatcaccagcaaaaatcgcagcctcatcaccaccagctgctgctcttatttctacaataacgtctttgtcatcattaggatctttaggaatcaataatattttaagctcttcttcaagatttggaagttcagctttaataccactactttcctcttttaacatttctacttcttctttatcatcagtttcacttaacatttcttcaatatcagctaattcttcttttttagctttatagttacgataaacatctacagttttttgtaaatcagcttgctctttagaatatttacgtaatttatctgaatcatttacaacatctgggtcacttaacagttcatttaactgttcgtatctttcttctacaatatctaattgaccaaacacttataattcctccttattattatcactaggtgctacgatatggtgcgcgcgacaacgtggctcataactttcattggcacctactaagataatcggatcatcgattttagctggtttaccatttattaatcgttgcgttctactagatgaagaaccacaaacagcacaaactgcttgaagtttcgttacttgttcactgacagccatcaatttaggcattggttcgaacggttcgcccctaaaatccatatctaatccagcaacaataacacggtgtccatctgctgatagtttttctactatacttacaatttcatcgtcaaaaaattgcacttcgtctattcctataacatcaacattagttaagtcgtgcgtcataatttcacttgctttagaaatattaatcgcttcaatggcattaccattatgagagaccactttttctttatgatatcgatcatcaatcgccggtttaaatacaacgactttttgtttagcgtatataccccttcttaaacgtcttataagttcttcggatttaccgctaaacatacttcctgtaatacattctatccaaccggaatggtaagtttcatacattgagagttccacctttttcaaaacataatcgctttattatatcatatttcaaatattcataaatgtctttttcataattatatcgatattgtacatgaacaattattttataaatttgtcatgcatatttatatacagctattctaatttggtgcttcttattcgtgcgatgtttctactcaatataaactttaatagagggggaatttatcattatgtattaacaacatggtattgagtcacttctttgaacacagtcgtaagtaaatacccttactacgctaataaataaaaaaagctgtctacaattccattataggatgcagacagcttaacgattactatattagttgtttgatttaagaccaaactttttgttgaaacgttccacacgtccatccgcagcagcgaatttttgacgtccagtgtagaatggatgtgaatcagatgaaatatctaaacgaataactgggtattcttttccatcttcccactccatcatttctgaagatgtttttgtagaaccgcttaagaatttgaagtttgtagtagtatctaaaaagattacttggtgatactcaggatgaattccttgtttcattattttcagctcctttgccctgaaccatctggaacagagttatttgtgagtttttacccaatactgtgtaattataaaggtaattaattcaaaacgcaagcccctatataatgtttattaaattataggtcgacctgttttagtactttcttctgcagacttttgtaactgtttaaagaagtcttcgttattcttagattttttaagtttacgaataaatctttcagtgaagtccgttgaatctgtaaatagatttctcaattgccataatgtatctaattccgatttactaatcaacaattcttctttacgtgttgagcttctgccaatatcaatagcagggaaaatacggcgttcagataatttgcgatctaaatgtaattccatatttcctgtccctttaaactcttcgtaaatcatgtcgtccatacgtgaacccgtatcaactaatgccgttgctagaatagttaaacttccacccgcttcaatgtttctcgcagcaccaaagaatgcttttggtttgtgtaacgaagctggatccaagccacctgacaacgtacgaccacttggtggaataaccaagttataagcgcgtgctaatcttgttatagagtccattaaaataatgacatcttcaccaatttctactaagcgttttgcacgttcaagtaataattcagctactttaacatgatgttctggtggttcgtcaaatgtagaatgcacaacttcagcagcctctactgaacgttctaaatccgttacctcttcaggacgttcgccaactagtaaaataaataattttgcatctggtttgttcgtactgattgcattcgctatttcttttaataacgatgttttacctgctttaggtggcgccactattaaaccacgttgacctaaaccaatcggtgttactaaatccatgatgcgcgttgaataattttgtgtttctgtctctaatttaatacgctcatctggataaagtggtgtcaaagcttggaaatgcggtcgtttcttcacttcttctgcgttatggtcattgacaaagtcaacttgtaataagccataatatttttcgttatctttaggttttctaactttcccagttactttatccccacgtttaatttcaaaacgacgaatttggctagcagatatataaatatctttttcccctttagaatagttcactgttcttaaaaaaccataaccatctggttgtatatcatctaagataccttccatataatagttaccatctttttccatttgtgcttccataatagctagaacaagttcttttttatttaatttactatagttcgtcaacttaagagttttagctttttgagtgagttccttggtagtatagttcttgtacaattcgtggaatgattcatactgaggagatgtacgttctctttcaggcatatagtttacacccatttcattattttttagttagtaagtaatagataggcatgacaatgcataaataactgtgctagcacaatcccattatgctaatccccaaccttttaaatacatgaataactatagcaaatttttattttaattacaaaatctatttataaaaattgcaaaattaaaacagtacacaaaacttaattagtcatgtgcactgttttattgcgatttttaattcaaaaatcaaatttatttaaaatagccagctatagatttcacttctaagaactcttcaataccataatcgccccattcacgacctaaaccagattgtttatagccaccaaatggtaagtctggctttctacctgcttcgtttatttctactgtacctgcttcaatagaacgagctactttatgcaatgtttctttgtccttaccaataacatatcctgccaaaccatattttgtatcatttgcaatttgaattgcttcatctaaatcgttataagtgataactgacattactggcccaaaaatttcttcttgtgctatcgtcatttgattatctacattaataaaaattgtcggacgtgcaaagtatcctttttcaagtccttctggtttaccaggaccaccataaaataattcagcaccctcttcaatacctttattaatataattttgtacttgatcaaattgttttttactaatgatagggcctacttgtgtaccatcttctcttggattcccgacacgcacttggctaaattgttcttttaattcagctaagaatgcatctttaattttgttaggcactaaaacacgtgtaccagctgtacatacttgaccagtattattaacaactttgcctgttgttgctttagccacttctttaatatctacgtcatctagaacgatgtatggtgatttgccaccaagctctaatgatacctttttaaaatctttagcggctttttccataattttagaaccagtagggcctgatcctgtaaatgacatcatgcgtactttaggatgttcagataaaggatttccaacgccagcaccatcaccattaacaaggttaaatacacctttaggaacaccgactttatcaaaaatctcagctaaaataacagctgcaaatggtgtttcttcagatggtttaagtacaactggactaccagccgcaaatgctgctgctaattttaatgatgtttggtttgtagggaagttccacggtgtaattaagccagatacaccgattgcttctttaacaactaaatcatctccgcggcgttcttcaaattcgtagttatctaatgcgtctctcgctgcaacaaaatggtttagtcccatttgataatggacacgctcagataatgataaaggagcacctaactcatccgtaatagcttgtacaatatcgtcttttctgttttcatattcttttacaattttatctaataatgcttgtctttctttcacagatgtatgacggaactctaaataaacattgtctgccgcctcgacggctttatcaacatcagctttattacctttagcaactttcccgattacttcttcggttgctggatttataacttctatcgtttcattactattactttctacccattcgccattaatatattgctttgtgtagtctctcattattctttcactcctcaagaatgatttatatattatttatccgtaatgcatacgatataaacattacattccattatgatacgctcctttttaatatgttcaaaataaaatgctttaaaattttgctgcatctaattttttatatttttaaataaaaataactattcccacatcatcgcgaataatgcgaagacttagaaatagttataatcaatgctatgtttaaacgtcatgtaattatttagcagtacgttgatctgttaaatcgacatatgattgcgcccatgcttcaattggatgtaaagcctctgctaacgcttcacctttttcagttagtacataaataatttgtactggactcgtagaaatgatttgcttctcaactaactcccattgtgcaagctctgacaacttaagacttaaagcacgtggcgttattgttttcaaatctcttttcatatcggaaaagtgtgctgaacagtcattacatcttgagagataattaatgattaatccattccaacttctaccaagtattttaaaagtttcttcgagatacggacatacttccatcatcttcacctctcatcaataaatttagaatgtaaacgaacacccttttttaatcagtataattattataccacaaaacaagataaatctatacagtttccgtccaaatatctgcacctaaagcttttaagtgttctacaatatctgtataacctctataaatatgtttcacattgtaaattgtagttacaccctcagcaattaaaccagcaataattaaacaagctcctgctcttaaatcgctagcataaacatcagcaccatgtaatgttgatggttttatcgttgctgtgccttcgtcaacttcaatatttgcacccatgcgctttaattcttcaacatgtttaaaacgttccggataaatcgtatcagttacaaatgaaggaccatttgccataaataataatggtgtaataggctgttgtaaatcagtagcaaaacctggatatactagtgttttaatatcaacaaattgatatggtgcattattattgatgcgaattctttcgtctcttacatcaacattcacacctaattcactaaatttagcagttaatgtttctacatgtttcgggacaatattatttaatataacattttctccacatgctgcagcgatacacatatatgtgcctgcttcaattctatcaggtataacttgatactcagaaccatgtaattctttgacaccattgattttaattgttgatgtacccgctcctttaatattagctcccatacttgttaagaagttagcaacatcaactacttccggttctttagcagcattttcaattacagtttgtcctgttgcataaactgcagctagcataatattaattgttgcacctacactaaccatatctagaaaaatatgcgcaccctttaactctttagcttcaattttcattgatgtcgtacttgattcatcaatttcagcacctaaagctttaaatcctttaatatgttgatcaattggacgtggcccaagtggacatcctcccggtaaaccaatcacacattttttaaatctacctaacatggtgcccatcatatagtatgaagcacgtaatgattcaactttattatttggtaatgcagcattttgtatttcagttgtatcaacttctaactccgtaccatttagtgatgccttaatatttaaatcttctaataaactcactaaagttttaacatcagagatttgcggtaacccttctaatttcacatgtccttgagctaataatgttgcaggaatgatagctacagcactgtttttcgcgccactgatattaacttccccatttagtgtgcgtccacctcttatttttattacctcttgagccatatcatttatctcctttgtccattactttttaattttttgcattattagcattataaattaattttactttatttgtaaaatagtttattttaatcgttaaaatcttgtctttctattttcgattgattaataacaaatcattcacctttactaatatatgctgttcttccccacttgaccatggtctaaagtctgattattcaactaaatattgacgttgttttgacaattatttagttttatttctatgatttgcacgtaaacttttttcataaattgctcattttccttataattatatcacaatcaattttgatatatttcaccatttttacgctttcattttaaaatcaaactgttttatttattacttatacaacataaaaaagaagcaaacaccattttgtctgcttcttttaaaattaatatccctacgttattaataacttaaaaactaaatattaattatttagcgcggtttgaagtaccgaactctttaattttacctttaactgtttctttgatagcttcacgagctggtcctaagtatttacgaggatcgtaaacttctttgtcgttatttaaaacgtcacgaaccgcttttgctgaagcgatttggttttcagtatttacgttaattttagctgtaccaaatggaattgctttttggatatctttagttgggataccagtaccaccgtgtaatactaatggtaaaccagttgataaaccgatttcttccatttctttgaatcctaattttggttcacctttgtatggaccatgaactgaacctaatgctggcgctaatgcatcgataccagttttttcaactagttcttgacattctttaggatcagcataaatgataccgtctgctacaacatcatcttcttgtccgccaacagtacctaattcagcttctacagaaacacctttttcgtgagcgtattcaacaacttttttagttgttgctacgttttcttcgaatgggctgtgtgaagcatcgatcattactgatgtgaaaccagcatcgatagcttctttacatttttcaaagcttgaaccatggtctaaatggattgctacaggaatagtgatgtttaagtcatgcattaacccttcaaccattttaacaattgtgtagaaaccgctcatgtaacgagcagtaccttcagaaacacctaaaattacaggtgcattttcttcttgtgacgcttctaaaattgcttgagtgaattctaggttattaatattgtattgacctaccgcataaccattttcttttgcatcaattaacatttctttcattgaaactaaaggcatgaaagttcctccttgagtgctttcgcacgtatttttcaaagtaattatatcaaaaaaatagcgtcaatgcattgaaatactgcagattaaatgtgtattttttgaaaaatgcgatagttatactaaatgcaaacgcatacatttttatacaatttaagccgttgcataatatgtagtcattaattacaatattttataagtagattggaggataaagatgtcaaaaatcttaaacacacaactaataggtatctttaataggctagaaaaacaatctttagaaattcaaatggccgcccaatgtttaattcaagcaattggtggcgaaggttatgtttatgtaaaaggttatgatgatttacagtttttcgaaagtttcattctacatagtgatgagcgtttaaaatctagccgaaaacttgacgctattaaagactttaaagaaattgactcaactgatcgtgtattattattcgcaccattttataatgatcaagttgcattagatattcaaaaacttatcgacttagatatcgatgtggtcttaataagcaacaaacctaaaacagatgatttccctgatcatctcgtacattttatcgatttatctacaccaagacctatagtctatactgaagattacgataagattgtccagccacatgcgatggcattgaattatgtatactatgacatttatacacaaatgattgaaatgacaagagacttagaattataaaagtcactattgttatttaataccttgtcactaacataatattaaaattataagaaaaaccggtactttcaatgtttaacaatgaaagtaccggttttattagcaaatttatttattttgttgatattttaatgaagcttcaatgaatgatttaaaaatcgggtgcggacgatttggtctagataagaattctgggtggaattgacaagcaataaagaaatcatttgtcggaatctctaccatttctactaaacgtccatctggacttgtaccagaaattaccataccatttgcttctaattgttctctatagtcattattaaattcataacgatgacgatgtctttcttcaatttccgctttaccataaacatcttgtgccaatgtgccttctttaattgaacatggatataagcctaagcgtaatgtaccacctaaatcttcgatatctttttgttctggtaataaatctataattgggtatggtgttgctgggtctaattcagctgaatgtgcgccttcaaggcctaatacgtttcttgaaaattcaactgttgcaagttgcattcctaaacagataccaaagaatggaacattgttttctctagcatacttaattgcactaattttaccttcacttgcacggaaaccaaatccacctggtactaaaataccgtcgacatctgcaaggtattcggccgcattttcatctgtaacttcacttgaatcaatccatctaatatcaatatctttagcgaaaggatatccggcatgttttaatgattcaactacagataagtatgcatcttgtaagctaacatacttaccaactaaaccaattgtaattttaccatctaaattattaacgatatctaacaactgtttccattcatcaagctgtgtttcatatttcgcgtttaattgtaaacgtttaataacgatatcatccatattttgttggcttaattgtaacggaatttcgtataaagagtctgcatcacgacattcaataacactttctttattaatgtcacagaataatgcaattttatcttttaaatcttgtgtcatttcatattcagttcttacaacgattaagtctggttgaatacctaagcctcgtaattctttaacgctatgttgtgttggtttcgttttcatttctccagcagctttaatataaggcagtaatgtacagtgaacatacataacattttctctacctaaatcgctacgaatttgacgaatcgcttcaataaacggtaatgactcaatatcacctgttgtaccgccaatttcagtgataacaacgtctgcattcgtactttcccctgcaagtaataaacgttctttaatttcatttgtgatatgcggaataacttgaactgttccgcctaagtaatcaccacgacgttcttttttcaatacgtgtgaatacactttaccggctgttacatttgaaaacttgtttaaattaatatcaataaatctttcgtaatgtcctaagtctaggtcagtttctgcaccatcatccgttacgaatacttcaccatgttgataaggactcattgtacctgggtcaacatttaagtatggatcgaatttttgaattgttacatttagacctctatcttttaataatctacctagagaagatgctgtaatacccttccctaatgatgaaactacgccacctgttacaaaaataaattttgtcatgtcttgacctcctaattattaaagggaatgcttcctcatcaattgtaaaaattacgtaaaacataacattaaagcaagctcattcaagttgtttatttgtcgaattcgacaaaattaaattctgtttacttaccgtttccatactgctatgtcactatgtatatcatttacaactttgatttttgcgttatcatttcttgatttactcaattaaataaaaaaacgctccctctcacaaattctgtaaggggagcgtataaattttatacacgtgtcctatttaaaggagcccgaataaaattttatcatctttcaactaaaagtcaaacaaaaaattaatcgttgaagtcttcttcgtcttcaaacacttcttcgtcttcgtctagttcatcttcatcttcttcaatgactatatccgaatgattgatttcttcttcaacctgctcatcttctggatcatttagttcttcttgatcatctgtttgagctggaatatcatcgtcgtcatccatttcatcttcgcccaataattttaagttttgatcttcttcatcatctgcatccagaatatcgaatttttgaatagttggtgcgattttctcttcaatatcatctaccgaataccaatcacgtaatccccataaattttctccaacatttaaaaaacgaccatctgtgtttaaatctgtgtaaaattgtacaacacgattttcaatttcttcgtactcataatcacctaacgctctaaactcatcgatgatatcatataagttcatagtttcgcctttatcattcaataatgtataagccatatcaataaatgatttttcatcaaccatttgttttgtataatcttgaattttcattgcccaatacttcctttcgaaggatataatctaaatttatacgtctgaattcatttatatatagtaacaaaactaaattataaatgacaatatcatatttcgcaatcactgttagtaatttaaatatttttcgaaaacgacataatcatcagtttgttcgatttcaacgaaattactatttagacataatggtttaaaatcattattctctccaaacagaatcatcgttatcacattaaggttgtcatagttttttcttaagtaagtaggcaattgtcgaagcgcacttgaaccaataccattaaagcgatatgatttatccacttcaatagcagcaatgttcatgcgttcaccaatctgctccaatgcaataaagccaaccttttggccatcaatcattaaattaatgatatgtacattggtcacttctgaacgactttcttcttcaagctttaatgacgaaacatgttttgaatctaagtccaagtaatatagtcgttctttgccaattggtccttcttctttagtcgctgtatgcatgaatccagcacgttcgtataggttccaagcattgtcattttccgcatctactactagatatagatgattaaaatcaggaaatacaccttgaacatattgtggcaatgacatcattattttcgtgccatatccaaaaccttgatatttttcattaatcgataatgaacgaatataaacgacattttcaggtgtatcataaccttcatgctgatagtaacgatgtaatacaaaaaagcccaccacttcatttttatcgtttattgctacgttagcaatcctatcagcatcattaattgcatcatcaataacttctttaggtaaagacgaatatatttgttgtctttcattcaagtcaaaatcattaattgctgaacgatattgttcatcaaatgcttttaaagtgataccttcaaaacaaagttctttagccatatatttaacccctatctttttatatatgaagcatgaatccccatattattttacctattatttcactacgataccattatttgctctaagttaaataaattacttatttatattttttcaaattttaaaattaaagtgctatgtctcattacttatcattttaatcagagacttacaaatacactgcgtacgaactacttttaatattacgtcactaactaacaatcctatacaactttaaaattcctagaaaataatatatataacgtaacgtccacgtttgtaatacattaattgcgatacgcttacaatgttgaaatacaatgacatcaaatttgttaataattactattattacttgttttttagtcattttactatactattatttaaggatagacattaataatgaggtgggaatcttatgaaagttggcattgacgctggcggtacactaattaaaatcgttcaagagcaagataaccaacgtacttttaaaactgaattaactaaaaatattgatcaagttgtggaatggttaaaccaacagcaaattgaaaaattatgcttaactggaggtaatgcaggtgtcattgctgaaaacatcaacattcctgcacaaatttttgtagagtttgatgctgcatctcaaggactaggcattttgttaacagagcaaggccatgccttagcagattatatttttgcaaatgttggtaccggtacgtcactacattatttcgacggccaatcacaacgtcgtgtaggcggtatcggtacaggtggaggcatgattcaaggactcggttatttactaagtcaaatcactgattataaacagttaactgacatggcacaacacggtgatcgtaacactatcgatttaaaggttagacatatttataaagataccgaaccacccattcccggtgatttaacagcagctaattttggccatgtactacatcatttagatgctgattttacacctagcaataaattagcagccgttattggtgtcgttggcgaagttgttacgacaatggccattactgttgcacgagaatttaaaactgaaaatatcgtttatatcggttcttcatttcataataacgctttattacgcaaagttgtggaagattatactgtgttacgcggttgcaaaccgtactatgttgaaaacggcgcattttcaggtgctattggtgcattatatttaggaaaatagaaaaagaccatttatatgagcgttgttttaaataaacgctatataaatggccttttattttatggtctacgtgttttgaatacgtattgttccatttattatcacttaattacttacaactcaattcaattaaaatgcaagttcattagacaatttttgcgctgaaacaattgtaccaaccacgccagtttttaaatctatcgcaacggctttatgatcatctctaagttcatctagccattctccgaaaacagaaccttcaatcgtaattaaatcacactcttcaaaatcttcatctcgaacttttaacgctctgtttttaatactccatacaggcataatatgcggctttttttcgtcgctatcattttcactaatgagaataaactgcttactaccttttttagttaagccgtatacttcatcatatttcgctacatcttggacaaattctttgattctaattttatctaattccgtcatcacttcttgtgtaacagctacaacgtttagtagatgcccttcttcttccattgtttgattcataataatatggtcttgttcatcaaacaattcatctaattcataagtagcaaaacgatcaacgtccatttttacaactttatcaaatggaatatcacgacttgttaaaaatgatacggccacactttcttctgtccaaacgcctacatacgcttcacttttataatttaggcgtactagttttttatttttagaggcgaaataaatacattcatttattaatatatctctaaagaatggatatgctttataagacatgcttgaccctcactttttaaaatatgtcatacataaaatagtaaatgactccaacaagatagtcaattagacatattatgaattcaatttaatgtcatgtttttcattttaaaaattcaatagcattaaattttacgtatacacaaattcggtctataacacgaaacatatctagttactaaaaatttcataacgataacctttaatatgcctttatcaacaaaatggcaactcttataacatagtgaaataagagtcgccatttaatattagtattacaaagtattgccatatcataaatctaattactgttgactagaatcgaaaaaagcttgctacaagcgcatattcagtcaactactggcaacataacattgtagcgccttatgttccgaactctaacaacgttcaagttcagctaaaaatgcgcattcattctccagtactgtttcttttgaatctccatgccaaatacagccaaaccttgatttaactttatcttcaccgtaccaatcaccatcataataagataacgggtataaacaaccttctttgacatatttcaaaatcgtattgaagaaatgtgtattatcaccttttgaatgataactataaaacttttgatatcctgaattcaactcgttagcaagtaataacatgctcgttgaaccattttgtctaaagtttaaatcaatcgcataaacattatcatcctcatcgacgagtaagtcaaaaccagccacaccaaagaatccttgattcacaccgttttccataatttgtctacctgcttctataacgtgttctggtacattagtagtattttcatttccgttataaaatccgtacttatccgttaattgcgttgccgcaccaagatattgaatgcctagcgattccgagtatgcaaactgaacacaataattcgctttttcttcaatcttctgttcgataataagcgaattcgtttcagcagttgcatctttaatacgcgttatcgctttttgtaaatctgtatcatgataacaaatcataacgccatagccacctgctgtcggaagatcatctcccggcttaattacaaacgggaattcccaattcttaatctcgttttcgaattgctcaatttttacaacttttctttttggtaaaaacttcccatttgtccattcaggtattcttgctttattatttaaagcaacaaataacgttttatctaatgcataatattgctgattcaagattgtttcatcatgaatatattgaaaataaatctttttattttccttatgtgccaattgtttaatcaagttttcgtaagattgctgattgttaaatgtataaattgagttcggtacatccttaccaataacttgaaatagctgatgcaatttgtctgtcgcactagcttcgtgaacaataacaggtaattgatttgctattaataactccctaccagttaaaaaattagattgatgttcgtccggtttcaaccatggattcgatatatacgaaggtcttgacgtatagacaacatctttgtcatataaatcacttaacgttaagttcggctcattaccattatttgtcattacttcccattccctttcaaatgcgcatgctcttcaataatgtcttgataaacgtcttgatttgtaattaactctaaccccatcaacgccattattttagcacctttaattaatgcttcatcaccatgtacactcgcagctgcttctctaaatctatgcgtatgtcctactaaattacgtgatcctattttaatatgaggatgtattgttggcacaacatgacttacgttccctgtatccgtagagccataaccaaaatcatcatcaataactgcttcaccaacttcttcagcatatttagcaaataaatcatctaatttcggcgttttaatgaattcattcacaccgttttgaattggaccaaattcataatcacaaccagtctgtatcgcagctccacgtgcgatttgatttactttttctgttaatatatccaattctttacgcgtcattgctctagtataaaaacgagcatgtgtatagtcaggaataatattagctgctttcccgccatctaaaatcacaccatgcacacgttgaccttttttaatatgttgtcgtagttgtgctacaccattaaaataactaatcatagcgtctaatgcatttaacgcttcatctgcattttcagaggcatgagcactttttccgtaaaatttaacatctaaaacatccactgccaaagtatcaatcgttttataagtttcatttcccggatgaatcattaaggcaatgtctatttgatcaatcacaccagctttgacataagaagctttagcgctaccattttccccaccttcttcagctggacatccgagaacgactactttaccaccaatttgttcaatcacttgcttcaaaccaattgcaccaagcacacttgcagttccaatgatattatgaccacaagcatggcctaatcctggcaaagcatcgtattctgctaaaaaacctatagctggcccgtcaagccccgaatcatatgtcgctataaaccctgttgcatgcccagcaatctcggtttcaatttcaaaatcatgttctttcaaacgatctattaaagttcgagacgcaaatatttcttcattaccaagttcaggacgttcatgaattctatgactgatttcgatataactatatttatttgtttctatataatcgagaatttgttgtttttcactcattttttactatctcccttttaccctacactcattttaatcatccacaatattttgttctttcaaaatgaattattacttattctatcggttttatctcatgatgtcatctaatttttctttatttacaaaattttctaataactaaaatcacgctccacctttatgaaagtttcaaattgtaaaacataagtcctattgttacaatttaagtattgttagaaacgcaacttgcaacaaatttaagtttaataatgtaatgaatcattcgcgttttatagttttgagtagttaataggaggaaatttaaaatgacaaaaatgaatgttgaaagtttcaatttagatcatactaaagtggttgccccatttattagattagcgggaacgatggaaggattaaacggagatgtcattcacaaatacgacattcgtttcaaacaaccaaacaaagaacatatggatatgccaggattgcattcattagaacatttaatggctgaaaatattagaaatcatagtgacaaagtcgttgatttaagtcctatgggttgccaaactggtttctatgtatcatttattaatcatgataattatgatgatgtattaaatattgttgaagcaactttaaatgatgtgctaaatgctactgaagtgccagcttgtaatgaagtacaatgtggctgggcagctagtcattcattagaaggtgctaaaactatcgctcaagcatttctagacaaacgaaacgaatggcatgatgttttcggtacaggaaaataaagcttagtcaatcaagttaatcagaaaagcagtcgaacaatgatgttacaatagccattgtccaactgctttttattatgcttcaaaatcaaaaaatcgaacaaatgaaaaaataaaatctttaacatttgtccgatttatttaagaaccactataatttcttaattagtcccattaacacgaactgcataggcaaccttaaatatagttgccatgttggcaattgtttatctcctaaaggtaactttttaactgccatatagatattagctgggaatacagctagcaagaatagattgattgtatttttcaagcattgagatggtcttttaattaaaagtgcaagtccaaataatatctcaaagattcctgtaacaagaaccgctgtttttcgaagtggcaaacatttcggtatgatatttctaaattgtcgttctcgtgtaaaatgcaatacacctattacactaaaacctattcctaataaatatcttagtatgttcaatcagcttcaactcctactctgtaataattttatgaattaatgtaggcgatacaacatgatcagcaattgttatgcttgaatctaattttttaacaacatcgtctacatcttggcgattactgtgaatcgttaataatgattctccttcttctactttatccccaatttttttatttaaaacaataccaaccgctaaatcaatatcatcctcttttgttaaacgtcccgctcctaacatcatcgaagcgacacctatatcgttagagactaactcagtcacataacctgattttttagctttatattcgatttgatattgagcttgtggcaaacgctctggatggtcaataactgtttcgtcgccaccttggtttttaataaatgttttgaatttttctaatgctgcacctgaatcaattgcctcaattagcaatgctctcgcttcttcaagcgtttcagctttgtttgcaagtacaaccatttgagaacctaatgttagtacaagttctgttaaatctttcggaccatgtcctttcaacgtatcaattgcttcttgcaactcaagcgcattgccaatcgcacgaccaagtggctgattcatatcagaaataatcgccatcgtattacgtcccacattattaccaatacgtaccattgcgtgcgctaatgcttcagcatcttctaatgttttcataaatgcaccgctaccagtttttacatctaatacaattgcatctgcaccagcggcaatctttttactcataattgaagaggcaattaatggtattgaattgacggtaccagtaacatcccttaaggcatataattttttgtctgcaggagttaaatttcctgattgtcctacaactgccactttattttcattaaccaatttcacaaatgttgcttcatctatttcaacatgaaaaccatcaattgcttctaatttatcaattgtgccacctgtatgacctaatccacgcccactcatttttgcaacaggaacatctacagctgctactaatggtgctaaaaccaatgtagttgtatctcctacaccacctgttgagtgcttatctactttgacacctttaatatcactcaaatctatcatatcaccagaattaaccatagccatcgttaatgctgcacgctcatcatcattcatatcttggaaataaatcgccattgctaaacttgatgcttggtaatcaggaatatcccctttaacatagccgtcaataaagaaattaatttcttccgttgttagtgtatgaccgtcacgctttttctcaataatgtctatcattctcatttttatcatccttttcttaaaaaacttaggacaaagcatctgcgctttctctagtccatttttaaaagcacaagcgaaaattattatagcaagctatcgatttcatttttaatatcacaatttcaatgcgatgttattattcttaaatagattggttataacgtcaaagtccctattaaattatcttagaatcatcatggcatttatgatgtcttaaagctgatatcgacatacttatatatggttacgatgtcccatgcttacatgttttttataaaattagtaatctgaatctgcttctaaaccttgcataatttgaacgcctgcgctcgcaccaatacgtgtcgcacctgcttcaaccattttattgaaatcttctaaattacgtacgccacctgatgcttttacttctacatcagcacctactgtatctttcattaatttaacgtcttctgcagtcgcaccgccacctgcaaaacctgttgaagttttaacgaagtccgcaccagccgcttttgttaattcactcgcttttacgatttcgtcatggttcaacaataccgtctcaataatcacttttaccgtataacctttcgcagctttaaccactgcttcaatgtcttgttgtacatcatcaaaacgtccatcttttaatgcgccgatgttgatgaccatgtcaatttcatctgcaccattttgaattgcatcttctgtttcaaatgctttcgttgcagttgtcgacgcacctaatgggaatcctattaccgtacaaacgagcacctctgaatcagctagtcgctctgctgcatatttaacatgcgttggattcacacatacagatttaaaattgtatgctttcgcttcatcgatgatttgatcgatttgcgtacgtgttgactcaggcttcagcaaagtgtgatcaatcaattttgcactattcattttctacctcctcctttatgattgattataaaaatacggttgtaaattagttgattgagcgtcaggttcatttaaatatcaggttagatgtccgcttttatgtaaccgcatacatatactgttacattaattcatttcccataaacaaacaatacaattgaacatgatatcttcattatgaacgatgacttgccaacaagctaatcaggattatatttttataattctttaattctatagtacaaaaattcgcaaaaaagggaaacaaatgttatcttaaaattattaatgaatattaaggagaagataacaaatgacaaaaggtacaccacatattcaaccaaatggagtaaaaattgctaaaacagtattaatgcctggcgatccgctacgcgcaaaatatattgctgataattttttagaaaatgttgaacaatttaacgatgtacgtaacatgtttggttacactggtacatataaaggtaaagaagtttctgtaatgggttctggtatgggtattccaagtattggtatttactcatatgagttatacaacttctttgatgtagatacaatcattcgtatcggttcttgtggcgcattacaagaaaatgttaacttatacgatgttattattgcacaagctgcatcaactaattcaaattatgtagatcaatacaatattccaggtcatttcgcgcctatcgctgactttgagttagtaactaaagctaaaaatgtcgctgaccaaatcggtgctactacacacgtaggtaacgtattatcttctgatacattttacaatgccgatccaacattcaatgatgcttggaaaaaaatgggtattttaggtatcgaaatggaatccgctggtttatatttaaatgcgattcatgctggtaaaaaagcacttggtattttcacagtaagtgatcatattttacgtgacgaagctactacacctgaagaacgtcaaaattcatttacacaaatgatggaaatcgctttagaaatcgcagaataacttatttaaattgactttaattgctctttaacaatgtgattaaactcaaaaagccaacacattctgggcgtatccccatttatgtgttggcttttatttatattattacttatctgtagattagcttaagtaagatttaaacatccaattatgtttatctactgatgtttgcatacctataaacatatcttctgatacatcatcgccagcattaccagcaatttcaatcgctttttctaattgttttgagatattagtgaaatcttgagataattcttcaaccatttgttctgcagagtaacctttcgcagcttctttaacaattgattgctctaagcattcagttaatgtacctacagggtttcctcctaccgctaaaattctttcagctaattcgtctacatattgacttgcttcattatataattcttcaaatttaacgtgtaatgagaagaagttaggccctttcacataccagtggaaattatgtagctttgtataagctactgtccagtttgctacttgttgattcaattcttttacaacatcttgttgattactcatatttaatacactccttaaaattgtctacgtcttgcttgtttatattaattattatattataattattctaatctgtaaagtgtttttactctcttttttataattattctaatttaattataaggtgtttcgctttttaaatgcctaaattttaatccatcatctagtatgtctattatcaattagtaactatgttttatcaatcagtaagttttactttcgcattatcatctaaaaagaatgatttttcataatcatttggttggtgccaagttgttttccacattctatttctattattagcaaacattcgataaccgaaattacggactggtttaggtacaagccataaacctacgcccaataatttagttcgattaggtagtgctgtgattagttgaataatcgcctgcgattcaaaatatatacgatcacctttctgtaaaatcacactatttttatttgccgcttctggttgttgtttaaaaaattgttgtccaacttcaccttttaacgtggcaaattgataatttcttggtaggtcatgttgaattaaccagatgacatagttataacaatatatacagtttccatcataatatacgattggcataatttattcgctccttcaatagtacttatagtcatttttcctaatttaaaaacatttaaacaaggttgtcacttgataagtcctcgcgacacgaaattgccataaaatttatttttcagttttgtatttattgtataatgcattttttatttactttaaatttctcaatctacagtgtaatcttatttcttattatcaacttagcgtttagtcgtttatcttattcaacataccactggaaaactcaaataaagtttcaattcagtaacataaattcatttatattcatatactgtctttattatttattaaaataaaaacgagtaatctatcataagctcttaattagctcttatggttgattacccgtcattttttctttatacggttattcaaatatgcaattatgcaatttttaatcctatccttatttcttttcaaaaactaccatatatcattagtcatgtttgactttgactatacgtgtgtattttaaaaactgctctgaatatttttccttaatttcctctaaactgtcatatgtaataccaacaatatgccaattaggattgaaataatagaaagaatctttttgtcgtgaccatttaatcatattaccgtctttattataacgtggtaatgttacctcatagccttctaacacattaatatacgtttggaaaatgtctgtatctatacgattaaaattatcaataactaaatagcttttatcctttttaggcattaattgagtaataaatccttcacgatagtataatgcccctgtttcatttggtaaatacttgccataaagcatatcttctgaaaaatcaggatgacctgttgttataacaggatttgcattcgctttttgcaataagtcattagccgcttttaagccttcttcttttcgatctacaacaagtaaaataaatggctttaatgcttcttctttttcactttcaagcatatctggtttttgaaccatttcaaatggagatttcaatccattattatcgctcatttcaataattgcatcatactgtgcttgtgacatacttgcaatagcctgttttgcattttcttgaaggaaatataagtttttcaatttaggatgcttatttaatgtacttaatgtaattggcgtaatgtctttctcataagacacttcaatcactgtactatttgttctaccaggaattggtggtttttcatgaatatgctttgatacttctgcaattccaacgacagattgatttttcgttcgattataaaaaataatattgtcgccttcttctaactgagtataaaaatgataaccattacgtttaataccgttgtacgtgtgcgtataaatcgtatattggtttccaggttcaaattcttcagtttcagctaaaaagaaataacgtggtatcttaatttcgcctttaccaagaccacttattaaatcaaactcttctgcagtgatttggttgaacaatgtctctttcatattactcatacgaaattccaaagcttcactacgctttaaataatctgctgttaatggtttcaattgttcattaaaacgaaactgtacacgtattttattttgtgcacctgtttcaacactaataatttcaccacatccaagtagcccagtatccgtctgaacttgataaaagatgacttgatctcctactttagcctttttaaacgctctaaatccttgagatgggttaaaatgtgcgcctgattcaaataaagctgtttgtcctactaacggttcattatgattccaacggttatatccacaattcaaccaaaaataattcgtttctgctgtcatcttaatactccttaacctgaataaattttagaaacactatgaattatattcttttagtgtttcttatgcagttggacgcgtatgcgatcaactgtatcccctttgttcactgcgattttaatcgcatttcctataacattgtagcgcctaggacaataatttacgtcccagacccttatcgttttcacttctaagtaagtcgaactattttgctttacaacaagtgcgactctatatgcagttggacacacacatacgagcaactgtataccttttaatcagttttctatattttatttattatatctgtcttaatgataaaattgttacaaacagtttaacatatttagctacctattttgcatataaaaaacatgcttacatacactatgcaataaaaattacaaatttatatatgataccactatgcttgcttatctctatagcgccattgatacgcatttttaaatatctatacgcctttagaattttagcatgtcttaattttcattaaatattaattacttcattttatataaaccaacaaaaaccccctcactactatgcaagtgagaggttatgttgatgtgctttattttcatcaatgtcattaacacaatcatatttcttctgttaatgcactgtactatattcaaacgcgctatcgacaattaatttgaagctacaaaggtaccacataatggcaacacattaattaacaatgcgctaaactttaatgaagcgctggtttgcttgtctttaaaagtcaacatagcactgataattcctaaaatagccactatacgtggaattgtcatgctcggatactgcggtatatgtaagaaagcaccaagacctgctatcacaccacatactaacgcaatatatagaaattgcttcaaatcattcactcctaaattgttattacactattacacatagctaatcatcaatgtgaaatcaccttcaaagacactatccaaatcttcagaagtcaaaataaagtttgtaccagtagtcagtttgaaaatttcaccatcgacaatcatttgcccttcaccttccaacactgtaactaaacagaactctctaggcttcatataatttaacgtgccagaaatttcccatttaaccaaagtaaagaaatcattcgatacaatgtgtgtacacttatggttttcaataatttcactttcaggcaaaatattaggtaatggtgcattgtactgaataacgtctaaagctttttcaatatttaacggtctatcattatattgattatcttgacgattgaaatcataaagtctatatgtaatgtctgacgattgcatcgtttcgtatgctaatattcctgaagaaatagtatgtactgttcctgctggaataaaatagaattctccaggttttactttaatatatctaagtatcgactctatcgttccgtgttgaacatgattcgcaacttcttctctagactctgctaatgtccctataactatttctgcatcttcttcagcatctataatataccaacattcagatttgccatattgcccattttcatgctcataagcataagaattatcagggtgcacatgaatagaaagtgattctcttgcatccactattttagttagaagcggaaaatctttgcttgggaaatcaccaaacaattcacgatgttctgaccaaatacggtctaatgtttgaccttgatatggtccattaataatctcgctcgtaccatttggatgtgctgacacacaccaacattccccagttgtatcattgtctaattgatatccaaactcacttagacgttgaccgccccataattttgtttttaaaattggttgtaaaaataatggcattgttgcacctccattgtgattaagtaagcaatagaactctgatgttgttgttccattatattttgattttgttctcatttacatcgtattataaacttccacatttcaaattaactattagtgattgtaccatatttactaacattgcagtactgccaattaaagcgcttcacttaaatttacagtactttaacattttaaaaaatttatagcatcgagattatctctcttacatttgtacatatttccctttaaatttactcgcccattataccaattaataaacaactttaatagttgtgccatacattgttcaaattctttgtaaaacgcataaacaatacgtacttgttcatacttataattcatcattttcaaaaaaataacgagttacgaaaaagtaacccgcttcaaatcatatttactatccttattaatccgtttcattttcaaattgagttaaagcatctttaatgtcctggtcaccactaataatttgaaactcttggtgattaaaatgattggatgtgacaatttcttttaatactgtcgcaacatcttctctaggaatttcacctttaccttcaaaatattgtgctgcttctatctttccagatcctgctgcatttgtaagtgcccctggatgtaaaattgtataattcaaacctgaacgtcttaaatagtcatcagcgtaatgtttagcaattgtatatggctttaaatcaccgctatcatcaaaagcctgacgtctcgaatcatatgttgaaaccatgacatagtgtttaatattagcctctttactcgcaatcattgatttaacagcaccatctaaatcgacaataattgttttatctgcacccgtattccctccagaacctactgaaaagataactttatcgaatggtttaaacgtttcagttaaagtctcaattgaatcattttcaacgtcaacaagaattgctttcataccttgtgattttaacgcattaagttgatcggattgcctaacgcctgcagtaaatggtacattttcttttgctaattgttgcactagtaacgaacctacaccgccattagcacctataaccaaaatattcatttacaacactctcctatttattattccctatgccataccactttatgagatatgtaaaacttgttacaactataaaaatcaattgacatactactgggaacgtattaaattaatatatgaataaatattcatatgaaaggattgtcatataatgtcagaacaatattcagaaataaatacagatacattagaacgcgtaactgaaattttcaaggcattaggcgattacaatcgaatacgtatcatggaattgttatcagtcagtgaagcaagtgttggtcacatttcacatcaattgaatttatctcaatcaaatgtctcgcaccaattaaaattacttaaaagtgtgcatcttgtgaaagcaaaacgacaaggccaatcaatgatttattcattagatgacatccacgtagcaactatgttaaagcaagccatacatcacgcgaatcatcctaaagaaagtgggttataatatgtctcattcacatcatcatcatgaccatatgcatagtcatgtaaatacaaataataagaaagtattgtttatatcgtttttaataattggtctatatatgtttatcgaaatcatcggcggtctccttgctaacagcttggcattactatctgacggtatccatatgtttagcgacacattctcattaggtgttgctttaatcgcatttatatatgctgaaaagaacgccacagctacgaaaacatttggttataaacgtttcgaagtactcgcagcattatttaatggtgtaacgctttttgtaataagtattttgattgtttttgaagcgattaaacgtttctttgttccttctgaagtccaatctaaagaaatgttaatcattagtattattggtttaattgtcaatatcgttgttgcattctttatgtttaaaggcggcgacacttcacacaatttaaatatgcgtggtgcttttctacatgttatcggagacttattaggttcagttggcgccattactgcagctattttaatttgggcatttggatggacaatcgccgatcctattgcaagtattttagtttccgttattattttaaaaagtgcttggggtatcacaaaatcttcaattaacattttaatggaaggcacaccaagtgatgttgatatagatgaagttataactactattaaaaaggattcacgaatacaaagtgtgcatgattgccatgtttggacaatttcaaatgatatgaatgcattaagttgtcatgttgttgtagaccatacattgacaatgaaagaatgtgaattattattagaaaacattgagcatgatttattacatttaaatattcaccatatgactattcaattagaaacgcctaatcacaaacatgatgaatcgattatatgttcaggaacacatagtcattcacataaccaccatgctcatcatcacgcgcatgtacattaataattttaacctattgccattgcatcgattaaacttttcaatggcaataggttttttatgtctttatggcgacttgtttggtctttgatgatgcaatgtttattaacaaattttcaactattatttcttacattagtcatatttttgacaatttactattataattctctaactttagtcactttaattaatttttattagatattaatatgaaaataacgtgttttttgttattgtatttgtatgaagaaaaggaggcaccactttgtttacttactttaaatcagcatttaaaaatgctaaaccacaattattaataacattaatatatgcacttatagcatttgctgtaattgcagttgtatatttacttgctaatttccagcttgctaagtatgtacaaactattgcaatttattcacaatttgggcaaaaaccaccaggagatgcatatttaaaagttatcgctctattacttatagcagctgtagtttcactgtttgttttagttcaaatttttatcggaattacaaatgttatgaaacgagcaatgagtcatgaaaaagtaaaatttaccgatttatttattgcatttaaaaaaggtaattatttaaagagcgttctgatcggccttgtatctatagcaatgattatcgttctttcacttctgacatcattactatacaaattattttctccagtatcagaaatgattatgaattcagtacaatcatcatatgcagatagtacacacctggttggtattgctattacaactcaaagcatcataatcattgttgttttattgattaaagcaattattacttggttattgttaatacctgttttcaactttatgactagtttcgttgaatcaactaacgataaagtaaaaacacacttagctaatggatttaaagcaatgaaaaatggtcaaaaaacatttttcaaatttttcattggaatactattattaaacttaattattattttatttaaaacacctgttggttacttgatttcatttaatacgcaatcactctctcaaagtgttgcagaaaatatcataagagtttatacagtaatgacaatcattttatacgttgttattcatgcaatcattttaatgggtatcgttcaatattacttaaaacgtggtcaaaaaattactaaagataaagtaaaaacagctgacaagaataaaaaagttgttactgaaccaaaaaatacaaaagtagaaaatgataaagtgacaacatctgttgaaacaaaaacagaaaaagcacaagattcattaaatgataatactacaaaaacgatgacttcagataaaccagaagacaatcaaccaaaataaattttagagccccttacaactttagttgttaggggctcttatgcatgcgcttagcgcaggcgctcctacttttaaactttagttgtaaggggctcttatgcagttgatgcatagcatccaactgtgttcctctatttttcaactttagttgttaggagcttctttctaaaataactaagtgaattatctatatatgaagagatctccaatactttttatataattcgtgattacattctatactttttattgttttttgttgtattgatagttggctttattatttctgatcatgttcagaactacaattcataagaaaaatgtgttaaaatatatttgtagtaagtagaagcaaaagatgaaaatctttaactcttgaaacacaaaaagggcaacactcggaaacatgttaccctaatgagcccgttaaaaagacggtgaccttatattttatttaaaaatagccttcaaaaatgccggtcaaagcgaatagaaggttattttttatggtcttgagtactaatcaatactaaaccaatgattgttaatacaaccatcagcatttcaaaatcagacatgctagtcctttctaggagtaacaactataaccataggcatcacccctttattaagagattagccaccatctatccaacttgctcaataaatattataacatgcacacttttaaacagtaattcatagtataagttttttcatttcttaatcaactcgataaacagttgagtgacatacccttgtctaactagctatttcttcccctgttatcatttgttcatcatataaaaatttaatttctcattttttattctctgataaagcagagcaccaaccttttcggctgatatgctcccttcaaaatagacattgaaaaatgaaaactttgaaagagaaatcgtcagtctattattgataagtattatcctatcctcgaaaaattactttcagacactagtgaacaaaaattttactataagcgtatactttggcaatattcgaaggaaaaacatggattaacctgtgcatattatacatttagagcttatatacttaaacatgatgaatttactccttatattatgaaatgttatcaatagatgtcgcctaaagatacaacaagattcgagacaaaacctgatcatcaagcacagtttgactggaaagaaagcattaactttaaaacgaaagataatcaaaggattccactatatataggtgtgctactactttattattctcgttttataatcatgcatgacaatgagtaaatcaagtgatgccttatttaattcattaacacaatcgtttgagctaatagaaggtgtatataatgaacttgtaacggataacttgaaaatagtcatgtataagccaagaaaagaaagtacaagtggtcgaataaatcgtagatttaaataattcgctgatggttttaaatttcaagtaaaaccttgtatttccggcctccctagaaaaagataaagttgaatcaataacaaaaatattagatgaaattaatgcttaccaagacgaattgcatttggaagagattcctaagttttttaatcttaatgaacgatttaactactaagttcatactagtacaggtaaattgcctattactgcctaagagaaagaaaaaattttcttacaaccactacagaatgtgaatgtaaaaatctcatataaagtgaaacatatcttacttatggaatgaaatgtttgattatcccaaaatcacaaatgcgattttggagttgttaggggctctaacgcaaatacacccctacttaaaataacggtagttgttatagtatacttaaatgcataaaccatataaaaggtgatgctaatatgacatacggttcaattgtagctatactctgtgccctatttgcgattttcttcattccatatatggagaagaaagacaaaaagaagaaataacactagtatctggattactagcatacaaaggagcagtaagacattttctaatagaaaataactttactgctcctttgtaaattactcttcaactattgtaaattaaataataaataactgccgatgttattaatcagctaaaaaatgctttgctaaatattttgctgcgccatcctcttcattcgtgtatgccgttacatctgaagttaatgcttggatttcagggcgtgcatttttcatagcgactgtgtaatgtccaaattcaaacattgctctatcattatcactatcaccaatgactaacgtttcttcttgattgatgccaaaatgttcaatcatttctttaatgcctgtacctttatcagtttgataagccattgtttccgcattaaatcttgatgaatttgaaacactaatctgtaattgcacatgattttgctttaattcatctctaaatgctgttattttttctaaattagaactgaatagataaatttttgaatattcaccttcaggaaacttagttacccaatctatcttaccagcaagcgcatcttgtcttgaagaccattcactatgacttacgccattaataggatcttgactacgaatcatatctcgcaaccatgtttcatcttcttttaaagaaactctattaccttcaaatggaaatacctcataataaatttgttggcgcttagctaaattaataatttgttgcacttgagccaatgataaaccatgtttgaagataatttctccatctacttctccaatggttccatttgaactaatgatgccatttaccgcaaaatcttgaggtacaagttgatgtatttcagaatgcgaacgtcctgttgccaaaaatactttatatcctttctctctcaatcgattaatgacatctttcgtatacgttgatgcttgattattttcatgtaaaattgtaccatccatgtccaaaaatattgcttttacgttatccatattgccctccactgtcaattttagcttaattaaattttgtcattattagttagtatttgcaaaatatttactctaacatcgccatagaaaatcgattattccatctttgaactgctacatttttctggaaaaatcgtgacatgttttcagatgtcaaaatatcatctattaacccttgttgtacactttccccatcttttaatagcaaaattttagtaaagttcccagtaatttcttcaataaagtgcgtcacataaatcatcgcaagcgttggatatgaatctgacaatgagtcaagtatacttaacaacgattcgcgtgcaataaagtctaaaccagctgctggctcatctaaaattaaaacctggggttgtcccattaaagctcgcgcaatcatcactcgttgtttttcaccggtagataaataaccaatatattgttgcgctttagcagacattccaactaatttaagtaattgatgtgcttcattacgtacctcatcatcaatatcttgataaacaccaattgatttaaaagcaccgctaatcaccacatcgattactctctcaccctcttgaaacttttccagtaaactatgagatacaaaacctatatgttgtcgtacagtttctgcagaataccctaccttgcctggcattttaccaaatagattaacactgccagttgtcgcaggctcatatgcatttaatatatttaatagcgttgtcttaccagcaccatttaaaccatatagaatccatttgtcacctccattaatttgccaagaaatattttttaaaattgtttttccttgcttcattcgcccaacttgatctaattgaattaacatgcgaggtcacccctttattgctactccatacttctcataaaatcatattaacatatcactcttaattgtcagactatttaaataaattaaagtatttagaatctcgtttttatataaatcaaaatacgatagtataattaaacaaaacaccccattagacatatcatctaaaaggatgccttttaaacttaaatttttaaaacatatgtgggtttggaataaagattgattaaaacttaacaagttaagacatgagttaaaattgacttacaattttagttatagttttttattttcttctacagatattataattcgttgcttttttacttttttcatatgcattttctatatatttagttggattacccaaaaattcatcttcttctactaaagaaataaaagatcctgttaatgcatctatatttttacattcatcacacgtatattctataggttcctgattaaatctattcttcactattatgtcatataaataactattgtcagtatgaattgcggtatgaccatctgaattaataacagaatttcttaaccatgaataatcaccattatgcttcataacaacccctacaacaccattagtactagatgttctatctcctcttttcatttgtttaactgagtattctatttcccaatcaatccaattactttctttcatattaggtgaaataactacaattgttactgaagttgaatatatcttattttttaattcttttttaatatactctgttattctatcggacatatcaggagaatcacttgtctctccttgataatatttagcatcttctcctagagattccactattttatctcttaaatcttttgcttcagagtatttatatgaaataaatgttttacgcgccaactctaagtccctccatttttaatatatctaatctgaaaaagcctctaataattcttcaagagactctactatatatataggtttttttagattttcaaagtattctatttcaaaactaacccaatcagattgaactgaattctccgttctcaacaaaaccagcattttactttgctccatacgagccttcaatacttgctttgtatattcaccaacatacttcctttttaaataatcttgatccatagtccaatcacaataacacgttttattttgttcattaaaaactcttataatatcttcaactgtcttcttatcttttgtactatgagaaataaaaatatcatagactttttgagattgaatattcttatttgttaaatcattatataaatcttcaggttttttagtgtctaaagaagctctctcagtttgatatactttcttctttcctttaaaatttttccttagtttcacatagtgaccgtaatcttgtaaatatttaaaggctaaatttctaatcattttattttgttcagcatcatttaattttctaaaaaaacgcactatattttctgtatcaaatttttttaattccgttagaatttctagtttttcttctgtagttatatctttcttatgataagctttcatataaatatttaagtattctggatcaactttttgagtatatctcttagcttttattaaacgttcttcaattttccaattcttattcttcctactcttttctaaagctgctttttttatttttatctctgaagcattataattctctttatgttttttcattcttcctgctgaaagaatgtattttacttgaggaatcgagaaaaaatattcttctgcacttttcgtattatatctatttttgatttttttaactttatataggtgttgcgctttttctttgtaagtttgttgtctttccacaattatattccactggtatggaaataatcgctgaaattcttttaataaaatataccttgtatatttctctggcaaaacttctgctacttgtcgtatagggtacttcaagcttttattaaaataaacttcttcgtgatcatgttttctctttactttcccaaattactcacctatctttctaaagcattaaaaccccatgaattattttgttttttttatttcaattactaaatttactattttttgaactaattcatcaatactttgtttatttgaaaaatcacatttgtattcatttatttcgttatacatttttaatattttctctttaaattgtatatttatctcttcgttatattgttctgaaagattctttgttttataacctgtcacatttatagggagtctaaccaattcttgtctttctgctattttatattcttcttctaatccatcagctaaaacaatttttccatccttttctttatttccaaataaaaataatgccattccacactcagaaatcatttccaagcgattttttttccatacttcttttaagtctaaatcgccacttgaatcttgagaaaatggcaatatatttaaatgattctgtagtttagacttcttattactattaatataatcagctactccattaataacatatgatcctactcctaatccaaaacctgtaactaatttaaaatcattttcaactaattttttacttagttgatgtaaaaaatatttccctgtttctgaattaaaaggtaaatattctgtagcacttcctgatataaaaattgtttttcttctatatcttttataaatactttctaatatttctgtgatttcaatataatctttaactaataaagtttctattgaaaatcggcttaaatcttctatatgaagttgttgttttatctttgcatacataaattcttctgtattatcatattccttttcttctacttcttttaaaatacaataatgtggtctagtattgtcttctaacactaatcttattctcgataagatataactaatatttggatctgtaaagctaaaacctatgaatagaaaagtttttgaaagtaaatctccttccaatatttcacgaaactttggatgagttagattatatttttcataatcatctctagttaaaataatcttgtctatactgtctatatccccatgcattttataaactgtagcatccttatcggctactgaaacagttaattgattttgatttcttttcacatctacaattctgccctcagaatcaagagctttttcaatcatacaatcataattagttgtccaatatgtatcaatgggaagttttgctaaaagcttatgattttctgttaattctgctcttgttgaaaattgctccattattactgtatttagatttccacgacttcttttcttattaatataatgttgtgctaatcctacaagatcatgttcttctttatctatatttaattctaattcttctgctgcttcattaagcaatgtcttccaattaacataacctgctccacaagataatcctgctccagcaaaaatagccgctgtattactttctaaagcttttacatatttttcaatgaattttttcttatctatagtcattttgccatctccattcataaaaaattatataaaagcacaataaagagaatttctaaattgtgctttaaatctagttcttataattccatcgccagctgctctgacatcagctctgcttgttcaatgacggtttctactgcttgtttactgatttctggtggatatccgtactttttcaataggcgtcttacgataactcgcatttttgcacgtgctgattcgcataagttccaatcaatactcatattttctttaatagactgagttagttcatgagcaatgatttttaatgtatcatcacctagaacatgctcagctgtatcatgtgaagctaaggcatcgtagaaggcgttttcttccatgaccatgccattttccataacttttcttcaaaacctaaatttgctgttgccacgttgttttctcctgtaagttatatcttatatgtttattataccagttaatttgaactatcaatctctaaattacaatttataacattttatgaatcaataatttcgccctatgtgcatattcctttttactatgctttgctttttgtatgattacattacttctctctaaaatttcaagcgattctttcacccatgtcccactactattaactaaattcaacagcaagctatcaatcaatggattccaattaaccaatcccgtcgaagataaaatcaacatggaaagtgcacaattttctctttctacttctaaaattttaaactcattgccgttaaatagactaactgtcgctagtgcatattgacgaggtgttacaccatcttctaaatagctaaatactcttttcccatctcctattggcaatgaactcatctgtataataattaattgtacttctttataatcctctagttcttgcaatacatgtacaaactcacctaatttgccttctgcctgaactttctgtaaagctttattttcaatccctctcgctaaacgattacccgctgtatctgatgctgaacgaattcctgtatctttaaatgtatatcttttcgtactttcatcttcacatgttctttgttttattgctttaccttaaattttcactatgcttggagattcggcatactcatgaacttgtttattcatttcagctaattcaaaatcctctgttgcaccttctaccgtttcatctattatcttttccttttcttcagtagataattttaattcatgcatcgtatatttcttaggttcgttagatttttcatattttgataattcgggatgtgaaaatgatataacgtcaaatggtatttccttcttcttcacttcatttactcttaaaattatccctccggtttttacaactgctttaattgaaataggttgtttaaataaccactcaaacttcaattcacccgtatttaaaaatgtatatgcaatattttcaaacgtttttcttagatcctgattacctaatagccagactagctgatataaaaagcttttttcgtgtatttcagattgtattgagaagaaaagctcaattgaatttgtccttctgtatagttttcaataaaatactgtggaaaagagttcatttcaaataagcgatataataaaaagcgatagggcgttaagatactacgaactacttcaattagcggcaatgtatacgatttattattaaacttcactataaaactacttgacatatcctgatcgttcgttccttgtacagtccattctctctgtataacgtactaattgcgggaaaatcgtcaaatcaacttcttctaaattgtcaggtggcaaactatgacgtaaatcaccatctatatacatatgttgaatagctaatataggtaacatgccccaatctattaagattttttccagttctccctttcgctctaaaatatgcataaatcatgattttcttctcacgcctaaatggagaactaatccaagttaattgagcttgttctcctttagcaaatggccagtttttcaatttatatactttgtggttcatctcttttcacaccctggcttttttgaatgtatttagataattccttttttatttcatgaaagtgatgcgactttatcgctgctatccgttgtactttccaaagctttatcacttcattttcttctagcatctggtcaatcaccttacaacaacgtctaatttgaaatgctttaacggtttctattatttcgttcaataaagttgtcgtacttggcaacttagctgaataaccttctatatttgctgtaatacctaatcgcttccaaattaaagaatttgttattcgaacaggcttctcaacagttaataattcctgatgtaacgcctttatacgttgaacatattctcggtctcgcgcattccaatccacaagtctattcggttctgtatactttcgctggattggtaagttagccattagccactctttagcatatctatacaaatacatatactgtttacatagttgattccttatttcagttcgagttaattgcggttgagtacacattatttcggacaaatcattacgataggtttctaatctatctggtttaattgccttagcctcttttagagttggttcttctgcatatttcttaacagttttaggatctacccctagctctttagcaatagctcgaatactcattcctgtattcaacaatttttttagtagtttacgccatacatgaccaaaagcttttattctaccaattctatattgatcttccacattattatctggccctttacgcgcatacacaaagccacaagaacaacaaaatgtaccgattggagcttttgttttaaaatccctcgtaacttttacagatggtataactaactttttgtaatgtttcgcagctctattcaaacacgggtaaggaccttttctaaatggaccgttatctacaatcaaatctcctacatcttgcttcaaatataacaatattaataaatggcgtaatgggttcacatgcctcgttgaattacgagttaatacttttacccaattatattcattttcttcattaaaattgctctcatagtacgttaaatgctcttctgataagtcgatttttatcatttgatataaatcttgttgtctcacccgattggcggctgtaattaaatttttctttctaagtaatgccttatacatcgaatctatttctactttggttaatgaatgtaacggtatttttaatagtttatatgcctgctttgctaattgaatgactatttcttcatatggctccacttcgtataaatctgatagattcatgtagcgtaattcaaagcgaatgtattcgatgcgactatcgcctgttaccggatactccctcaacggaatttcatggtgtgcacaataacttattccttgtaattgatgttctctgtgaatatacggctctctatacttatctgaatcagatttagcacacatatcacagtaatatagcccatctttacgacaaatgcctccagctacaataccaagccttgtatataaagcctgcccattatttttgacatcttctaaaatctccatctgtcgttgtttagataaaaatgaagcatagtaaggataaatcgtatggttagctaataaatactctaccgaatattgaggtcctaatttctctactaaattagtaagatgactaccaatctccatactcggaatcacagaacgactatcaaataactcttctaatgtatctttacaatcaagattcccactataaaaatgataacgtgcaattgctgaatacaataattcatctggatatggattcgtgaagaaaggtagcatttaattacctcttatattcaataaaaatttctaattaaactaaaactcttctttacttttcttaataatatcagtacttggtgctttactagaaagatactttacataaacaagaagtttgtcgataaaataaatagtttcttcctaactaattaaactgatatcaaagttgttcccatgcctaatatctttatatttattatgaaacatgttccacatagtaatgccctctttaataataaaaccttgtccccatgtctcttcatcatctctcatagctttatcagctgctgaaatatccgtcgttcctgtcaaataagtcattaaagcttccatagccgataaacaatcacgtatagcatcttttctagctctaagttcattcactctattcagttgttcctgtgcttgtttaatatgttctgctgtttgtttacaaagctctgaagtagtaattatcaattcttcaaaattcactacttcaccaacattaggattaatacataaccagttatatttagattcatttgttaatttgtaaccaaaattataatcttcgaaaacattatcattcttcgccaattcactcgtggcatccataaatttatggaatttacctatttttttaaaatctacaacttgctcttcaaaatctctaataataaaatcatatccccgattttttattattagtgtaaatcgatactacatcgcaagcatttttaatagtttcatctaaatttaaatacctgttttgctgtttttgctgaatatatacccttggtagtctttgagcaatttctctaagtaattcctctgttacaacattcattaaatactcttcatttttataatttaaataatcaggaaattgttttttaaattccatcaaaaattctactcctcattccaaagttacgaaaaattctaccattggattttttatataattttcttctttaagtccttcatacacatgtttcttctgattcaacgctttctccctagcatctaatagtggtaatactttacccgaaggtactaccttcacttttttctcattaagcttcttattcaactcaattaaattaggaataagttgtgttttcagtaggttataatccgtttctatcgatgaattttctactaatttttttgtagtttctttaatgtgacttggagttaaagcatcaaaaatgccgattgctgcaacttcttcactcaaaccttcaatcaactcttggcgcttgtatgttaaagtattttttcgctctttcatggcctctttaattcgaccttcatactcagtattttgcttatgactttgcattaattcatctaaattaatcataatatcttcatacttatacattgctctaaaatcattttttcgaatagcatttaacgttggctgaatgattttcatatcttcttttgccgttttctttaaaactcttatcgtcaatttttcatcttcgttcgattcatcatatagtgctctttcttgagccaatataaatagattaacagcgactgaagtaatcccctgacagtcattatagaaagcctttttaacgtcctgtgtaagctctgagtaagttttaagacattgtaattcccataatgtttctaaaaagaactcccattcttcactatcctcattcatgcgatcccaaataatcgaaccttcactggctgcacgacgagcctgacggaagtttcctttaaataattgttgagccttagatgtaccaatcaaaactgttggaacaccaaccgtattagacaaggttacaaagaaattaagcatatcttctttgtcattttttgcatgtaataaatgttgaatctcatcaattacaagtacgccaacaccatacatattagctaatgaagtcctatgtaacaacatagttgatgttacacggtttaagtagccaaatttctctaaataacgcgttcctaataattcatcaatcgctttaaagaagattttacatagtgtggaaaggctgccgtcatacgggcaatcaattttcagccagacaatttgtgtacgattaaatggttgttcttcatacttctaatgcttaattacttgtggatacattaacaataagcgttcaattgctgttgtttttccgatatctgaaatgccaataatagataagctatctgctgtcgaacgaatgtaatttaagcgttcatctatatatttatgagcatcttcttcatcttctcgtaattggtgtaaaactcaaatacgttccaaaaatgttttatccaaagggtttctggctaagtaacctctacgaatcaacgtagataatcgacgttttacttcgaaatgaataggtaatggctgaataaatttttttatacgtttaagcacatgatagcgaatgtttgtcgcactctgcttatcttgatttgttattcgtgatgccaccataaatcgatccatcacatcatcttcactcaaaataggtgggagcgcctcaatgcatgaaggctttatgacattgattaaagagatgtttccgaacgctaaaatagttatcgatcgattccatattgttcaattattaaatcgtgctttaaatggtattcgagtcgctgttatgaatgaattaagaacgacgaatcaacctttatataataagtttaaaagatatgcgaaattactattaaaacctggagaagatttaggggcatttgaatatcgtaaagtagctttatttaaggaatggaagacacaaaagggtatcgtcaagtatttattagatcaagatgactcgttaaatgacgcctaccaatatatcaatcagctacgattcaaacttaaacataatgattatgaaggctttattcacgaattaaaacatatgccattatcccaaacgcatttagttgtccaacgagcaattaagacacttaacaaacatgcatactttataaaaaatacatttgattattacaatttatcaaatggtcctttagaaggtataaataacaaaataaaattaattaaacgtacatcttttagttatggaaattacaatcatttgcgcaatcgaatattattatgttcaaaactttacgctccaaaaagtaaaaggaagttaagcaatgtttagttgcctaacttccgatattgaacgcatcagtccaatttgacatagagtcttctttttgacataaaaacaccagctcgtcgagctactattttccttatattaagtgccattaatacaaaacctagctctcgtttaactttatttattcctcgaactgacattcgagtgaaacccaaaatagccttcataaatccaaaaacaggctctacatcaatttttctttgactatagatttttttcgtttctggttcagaaagcttttgattaatttgggctttaaagtattcccaattataattcttcatgattttcttattggatttcgaatttggcttcatgcattgttgcctcaaagaacatgctgaacagtcatcgcattcatatagtttgaagtcacgtttaaaaccatatctatcattacggtatgcatatcttttaaaacctattcttttgttattaggacatataaattcatcattaagttcgtcatatttccagttttgagtgttaaaaatgtcacttttaaactttctcgttttatccttaataaacataccatacgtaataagtggcgttttattaaaatcatctataatagccatatagttttgctcactaccataacctgcatcagctacaatatactccggtaaataaccgaaggtattttgaatcattgttaaaaatggaattaaagttctagtatctgtcgggttttgaaataggtcataagataaaacaaattgagaatttgtcgctatttgtaaattgtatcctggcttaagttggccatttttcatatggtcttccttcattctcataaaagttgcatcatgatcagttttagaaaagctatttctatctttaagaatcgatttttgttcttcatatttactttttctttcggaataatcttcaaatttctttttgaacttcttaatctcagttctttttttacgggtctgttttctaatttgagtacaatctttgttctgaatagaatgatttaaatcttcgatttctttatctaaatgactaccaattaaatctatttcttctattgttaaatcgctatctccatcttcttttatctctggtattattttttcttcaactaagtcacgatataatgcttttgaattttcgttcaatttcgattcgtgattttgaatacttttcttccacacaaatgtatacctattggcattagcttctacttttgtaccatcaataaaaattgaattatcatcaataagattttgctttaaacattgactatgaaactgaataaataaaaattcaattaatgcatcagtattaggatttactctaaaacgattaatagttttataagaaggtgtttgattttgagctaaccacatcattcgaatactgtcatgaagtaatttctctattctacgaccagaaaatacagattgagtgtatgcatataagataatttttaacatcatttttggatgataggatgttgcgccacgatgatgtctgaattcatcgaattcgctatcaggtatcgtttcaacaatttcattaacatatcgtgaaatatcattttgaggaattctaacagaagtttctattggtagtgtaagttgggtcatgttataattttttacataaggcacctcgttaatttagtttagtggtatttattaaattatacgaaagtgtcttattttttttaaagtatttcaaagtaaaattacatgttaatacgtagtattaatggcgagactcctgagggagcagtgccagtcgaagaccaaggctgagacggcaccctaggaaagcgaagccattcaatacgaagtattgtataaatagagaacagcagtaagatattttctaattgaaaattatcttactgctgttttttagggatttatgtcccagactcataaaacggtgcaacttttttataaacggtataattttatttaaaacggtacatcttttttatcaacggtacaactttatttcaaacctacaacatgcactgataaaaaagtgaattattccacagtaacagatttagcaaggttacgtggtttatccacatctaaatctctgtgtaatgctgcatagtacgaaattaattgtaatgtaacaactgatactaatggcgttaataattcatgtacatgaggaatgacataagtgtcgccttctttttcaagaccctccatagaaataatacatgggtgtgctccacgtgctactacctctttaacattaccacgaattgataaattaactttctcttgtgttgctaaacctacaactggtgtaccttcttcgattaaggcaattgtaccgtgtttaagttctccacctgcaaaaccttcagcttgaatgtaagagatttctttaagttttaacgcaccttctaaacttacgttatagtcaatagtacgtccgataaagaatgcattgcgtgttgtttctaagaaatctgtagcaatttgttccatgattggtgcatcgtcaacaatcgcttcaattgctgttgttacttttgctaattctctcaataaatcaatatctgcttcacgaccgtgctcttttgcaacgatttgagacaagattgataatactgcaatttgtgcagtatatgcttttgtagatgcaactgcgatttcaggacccgcgtgtaataacaatgtgtggtctgcttcacgtgataaagttgaacctgcaacattagtgattgttaatgatttatgacctaatttattagtttcaactaatacggcgcggctatctgcagtttcacctgattgagaaatataaacgaacaaaggtttttcagataataatggcatgttgtagacaaactctgatgcaacgtgtacttcagttggtacgccagcccatttttctaaaaattctttacctactaaacctgcatggtagcttgtacctgctgcaataacgtaaatgcggtctgcttctttaacatcattgatgatgtctcgatcaattttcaagttaccttctgcatcttgatattcttgaataatacgacgcattactgctggttgttcatgaatttcttttaacatgtagtgtgcataaacacctttttcagcatctgatgcatcaatttcagcaatatatgaatcacgttctacaacgtttccatctgcacctttaataataacttcatcttttttaacaataacgatttcatggtcatggatttctttatattcgcttgtcacttgtaacattgcaagtgcgtctgatgcgataacattgaaaccttcaccaacacctaataataatggtgatttatttttagcaacatagattgtgtctttgtcttcagcatctaataaacctaatgcatatgaaccatgtaataatgacacaacttttgtaaatgcttcttcagttgaaagtccttgatttgaaaagtattcaactaattgaacgataacttctgtatctgtttctgaaatgaatgatacaccttgtaagtattcaccttttaactcttcatagttttcaataacaccgttatgaactagagtaaaacggccatttgatgattgatgtggatgagagttttcatgattcggtacaccgtgtgttgcccaacgtgtgtgaccgattccaacaggtccatcaaaatcgctactatcagcaactttacgtaattctgcaatacgacctttttctttgaatacagttgtattatcatcatttactactgcgatacctgcagagtcataacctctgtattctaatttttctaaaccttttaataataattctttggcattatcataaccaatataaccaacaattccacacataacgacattttcctccatattggaatagtacgcgtaaattatgatttattgccgataatttagattgacaatctgctttcataatataaataggaacatgctatcatcgcattcatccataacaaattaagcatagttatttttacaactatacaaattgctcacactgtactttccatattaatattttttatattcaatttctggcgatcttattaactttgtccattaagtcaccctaatgttttacttaataagctaacgaatgagccacatccgggatagcatccgccgatctattcgatcactatcctcctcgtctacaaatacatatattgcactctataaaggccactcatatattaacctttaatcttcaaatacaaatatttatttgcacaggcgctttaactgtactgccgaactttccccctttccattaatcattattgtacaacggtgttgttttgttttgcaaatattttcacaataaaactttaaaaatcctaaaacaatttttttgttttactttttcaaaatatctataccgtcacatttatgacactttatttaattttgtcacatttattttgacaaagttgatttttgtttatattgagtaataaggtatgtctctttacactaatggtagtcacatacattaaaaaagaggtgtaaatatgtcgcaaactgaagagaaaaaaggaattggtcgtcgcgttcaagcattcggatcatttttgagtagtatgattatgccaaacattggtgcattcatcgcttggggtttcatcgcggccatttttatagataatggttggttcccgaataaagatttagctacgttggctggtccaatgattacttatttaatcccactattgattgcatttagtggcggtcgtttaatttatgatttacgtggtggtattatcgctgcaacggcaactatgggggtcatcgttgcattacctgatacaccaatgttacttggtgcaatgattatgggtccacttgttggttggttaatgaagaagaccgaccaattgattcaacctagaacgccgcaaggttttgaaatgctatttaataatttttcagctggtattttaggatttatcatgacaattgcaggatttaaaattttagcaccacttatgaaatttattatgcatattttatcagtggcagttgaagcattagtacatgcacacctacttccacttgtaagtattttagtagagcctgcaaaaattgtatttttaaacaatgcgattaaccatggtgtattcacaccgcttggtgcagatcaagctgcaaaagctggtcaatctattttatacacaattgaatctaaccctggaccaggtttaggaattttacttgcatatatgatttttgggaaaggtactgcaaaagcaacttcatatggtgctggaattatccacttcttcggtggtattcatgaaatttatttcccatatgtattaatgcgtcctttattattcatcgctgttattttaggcggaatgactggtattgcaacttatcaagcaacaggatttggatttaaaagtcccgcgtcacctggttcatttatagtttactgtttaaatgcacctagaggtgaattcttgcacatgttactcggtgtcttccttgctgcacttgtatcatttgttgtagctgctttaattatgaagttcactaaagaacctaaacaagatttagaagctgcaactgctcaaatggaaactactaaagggaaaaaatcaagcgttgcttctaagttagtatcttctgataaaaatgttaataaagaggaaaatgctagtggtaatgttagtgaaacatcttcattagatgatgatcctgaagcgctattggataattacaacactgaagatgttgatgcacacaattacaataatataaatcatgttatttttgcctgcgatgcgggtatgggttctagtgcaatgggtgcaagcatgttacgtaataaatttaaaaaagcaggcattaatgatattacagttacaaatactgcaattaatcaattgccaaaagatgctcaattagttatcactcagaaaaaactaactgatcgtgcaattaaacaaacaccaaatgccatccatatttcagtggataatttccttaattcaccaagatatgaagaacttttaaataatctaaaaaaagatgatcaagcataataattaaataaattaaaaaatggaggataccgccatgttattgagtatacgtgaaaaagaaatgatagccctattgattaagtaccacggtcaatatatcactatacacgacattgctcagcaacttgcggtgtcctctcgtactattcaccgtgaattaaaaggtgttgaagcatatttaacttcattttcattaactttagaacgcgcaaacaaaaaagggctacgcattgctggcgcagattctgatttaaacgatttgaagcaatcgatcgcacaacatcaaaccattgacttatctgttgaagagcagaaagtaattattatatacgctttgatacaagccaaggagccagttaaacaatatagtttagcgcaagaaattggcgtttctgtccagactttagcaaagatgttagatgatttagagctcgatttaaataagtaccaactatctttatctcgaaagcgtggcgaaggtatttacttggtaggtactgaatcaaagaaacgtgaatttttaagtcaattaatggtgaataacttaaatagtactagcgtttattcagtaattgaaaatcattttgtctttcattcattaaatcaaatccacaaagactttgttgacttagagcgtatttttaatgttgaaagactattaatggactacctaagtgccttaccataccaaattaccgaatcaagttatttaactttaactgtccatatcgttctatccatttcacgtataaaaaatggagagtatgtcgcattaaacgatgatatttatgagtctgttcaaaacacatttgaacacaaagtagcaagcgaacttgctgataaacttggtcaaatatatgacgtcacgtttaatcaggcagaaattgctttcattactatccatttacgtggtgctaaacgaaaaaatcttaatgatacatcattaaataatcgttgtgaagaaaacaaaattaaagcgtttgttaaaaaagtagaaatgatttcaggtatgacatttgcagatttggatactttagtagatggactgacgctgcaccttaatcctgcaatcaatcgtttgcaagctaatatcgagacctataatccgttaacagacatgattaagttcaaatatccaagactgtttgaaaatgtaagattagctttaaatgattgttggcctgatttgatttttccagagagtgaaattgcttttatagttttacactttggtggctcgattaaaaaccaaggtaatcgatttttaaacatattagtcgtttgcagcagtggtatgggaactagccgtctattatcaactcgtctagagcaagtttttagtgagattgagcgtattacacaagcatcagtcagcgatttgaagtcactagatttaagtcaatatgatggcattatttctactgtgaatttagacatcgactccccctatttaacggtaaatccattattaccagatagtgatatcagttatgtcgcacagtttttaaatacaaagtctacgttccaaaagacgcatgataaatcatcaaacatgattgataaggatgatgttcatgttgaaacgaaagatattgatgacaacacatcttttgaaaatgaacaaacttcaaacttaacttcagttttcgaaaaacatttaagtgacgaaaaatcagaacaattaatgcatcatatgcgttcgggtttaactttgcttgattcagtgaaaatagttagtaccgaagttaaacagtggcaaacatatatcgcagattatctatatcaatgcgatgtaataaacgatccctcgtcattcgctgaactactagagcaacgattgatcgacaatccaggatggatattaagtccatatcctgttgcaataccacacctaagagacaatatgattaaacaccctatgattctaatcacagttttagaagaaccgttaacattgcctagtattcaaaatgacaatcaaacaattaaatatatgatttccatgtttattcctgacaatgattttatggcatcactgataagtgacttgtccgaatttttaagtttgaaattagaatctattgatacttttatggaaaatccacaggaacttgaaacattattaagaaacaaatttttagaacgaattaaaaaacaatttatttaggagtgtacagaatgagcgaattatttagtaatgacaatatctttttaaatgtaaatgttaacagccaaaatgaagcaattgaaaaagcaggtaaagccttagttgatagtggtgctgtaacagatgcttatattcaagcaatgaaagatcgtgagcaagtcgtatcaacatttatgggaaatggcttagcaattcctcatggtacagatgaagctaaaacaaatgtgattcactcaggtttaacattattacaaatccctgaaggcgttgactgggatggcgaagtagttaaagttgtcgtgggaatcgcaggtaaagatggcgaacatttagacttgttatctaaaattgcaattacatttagcgaagaagaaaatgtggatcgtatcgttcaagcaaaatctgcagaagaaattaaacaagtattcgaggaggcagatgcataatgaaagcagttcactttggtgctggtaacataggtcgtggtttcattggttatattcttgcagacaacaatgttaaagtaacatttgcagacgtcaatgaagaaatcattaatgctttagctcatgatcatcaatacgatgttattttagctgatgagtctaaaacaacgacgcgcgtgaataatgttgatgcaattaattcaatgcaaccttctgaagcattgaaacaagcaattctagaagctgatattattacaacagctgttggtgttaacatactacctattattgctaaatcttttgcgcctttcttaaaagaaaaaacaaaccatgttaatattgttgcttgtgagaatgctattatggcaactgatacattgaaaaaagcggtacttgatattactggccctcttggtaacaatattcattttgctaactcagcagttgatagaattgtaccattacaaaagaatgaaaatatattagacgttatggttgagccattttacgaatgggttgttgaaaaagatgcatggtatggtccagaattaaatcatattaaatatgttgatgatttaacaccatatattgagcgtaaattattaactgtgaatacaggacatgcatatttagcgtatgctggtaaatttgcaggtaaagctaccgtattagacgctgtaaaagatagttcaattgaagctggcttacgccgtgttttagctgaaactagtcaatatattactaatgaatttgattttactgaagcggagcaagctggttatgttgaaaaaataatagaccgtttcaacaattcttatttatctgatgaagtaacacgtgtcggacgaggtacgttacgtaaaattggccctaaagatagaattataaaaccattaacatatctttataataaagatttagaacgcactggtttattaaatacagctgcattgttattgaagtatgatgatacagcagaccaagaaactgttgagaaaaataattacattaaagaacacggtttaaaagcgttcttaagcgaatatgctaaagttgacgatggcttagccgatgaaataattgaaacgtacaattcactttcataatttattgagctttgtttgaaactataattttccaacgttattcgttaacaatcagtaataatgtagtagttccgttgaattaacaatattaaatttctgaacataaaaaatactcccttcaacatagacacttaacttgtgttatgtatgaaaggagtatttttgcgttaataatttgttttattttcgagccacagccacctattcaatggctattggtcattactaaaacaaattcatattaactgttagacttggttacttagtaaggaatatttccctatgaaataactagatgttcacattcttaaataaattttattcttcagtttgttggtctttcttagtgaatcttctaattaagaatgccatacctgcacctagagctaattcagcatatggtaaatcgtcattatgtgacataccagtatctggtaaagttttagcttgttgtttaagcttattaacttttccttgttgagctgattttgcatttgctttgttttcttcagtgttagttacattaagcatatcttgattagcactattgcttccatttgaaactgtagctggagatgcattggtaccgtcgttttgcgtagctttattgtttgcaactgggccaactgatgtttgcgtatcattagtatctgctgttgccgtatcatctttttggctaacattaattgaagtcattttttcttttgcttcagaagatgcagatgttgatggtttattcgatacatcagtatcaacgttgccttcagatttatctgcttcgttagatgcaacgttagtttcagacttaagttgtccagcatctgtttgatttgtcgtactttcttctttatctttctctgtattagaaggcacttttggtcctgtaatgtctgctgaaggcaatgtttcagttgttgattcaaccatactttgatttgttgaatctctaccatctttttctgccttagctttattttcagattttggttgtgcaaccttgccattagttgattgagattcagcactattatttacttcagcattttgttttgaatcatttacagatgcattatctttgctatcagcagatgatgctgcacctgtgctcgcatttgttgttggagccgttgctgttgatcctgttggtgcgttctcgtttgttgcagttgccgtaccattgttatttcttgtgccttctgctggcgttgcattatctgtctctgttgcaggtttatcagttgtaccattacccgttgccgaattgtctgttgatgcatctacactagaattgtttgttgatgttgctgttgttccaccagttgccgcatcattctgattatttgtcgttgttgaagacgtatctgcattggcattatctgttgactcagttacattaggttgtccagtattttctggtgttgcattagcatttgaatttgctgttgcatcattattatctgaaccactattagtatcattagcatttggatccttctgaggaacaatcgcttcaattgcaggtatcgttacattttgtaattcatcaacttctgcatttgtttgtgttttatctaatttatcagcaaatctgtcaaaatatctacctaaatccgtacgtgcaatttctttcgccgatgcatctgcatctgcatttttaattatttctatttgcttgttaaccacttctctaattgcttccaaagcatttttcttaactactggattaatacgttgtgctttaagttgttcaagcgcactatttttaacagtagcgatttctgcatttgtagtttgatcagaaatatcttcagttgcttttgataaaatgtcttctaatgcattcgtaaacgcttctttttcttcagttgtagcatcaacgttgacatttactcctgcttcaatctggtctagtgaagtttctaattcttcgatagctttttgtttttctgttgagtcaatttgaatgttatcaaacgcctcaagtccttgagctttcgctttttcaacttcagcagttgttgttgcatcagtaataccttgtttagcttgatctgtaatttgtttaatcgttgctaatgcagccgttttttcttcagcagttaactggtcactttggtctatagactctttcgtttcctgtgctttatcatcaattgcttggttcgctttaggtttaacagtagcatctacttgaatagcatcaattgctgctttaccttgtgttaatgcatcatcaacatcactattatccacaccattattaatgctttctaatgcagtttgaacattttggtcaacttgcttaattgcttgttgtttttcatcttgtgttgcattagtgtcagctaaaatattatttttcttctgatctgcataggcatataaatctgttgtagccgattcttttttaccggttggaattgtgtaatcgttaatattatctaagtcattatggatttgaacttcaatgtcatctttagaagtagcttgattaacattttgatccgctgtttgttttaattcagcaagtttttgtttcgcttcagcaatttcacttgaagtcgatgcgttagagttatccgcttcgtttactttagcgttatatgcatctgcaattttagctaaagcatcttttttgtactcactaaatgttttaactgcattaattttagctttcccttctttaaccgcattatcaacatattcatttgttgatgattgatcaatatttgttttcgcttgatttaacgctgcatcaacttcttgttttgcatcattaatttcttgttgtgacgcatttggtgtttgttcaatttgtgttttcttatcagctgcagcttgatctaattctgttttacctgctggtttcttaacaggatttgcatgaagttgttgaactttttgtactgctgtatctttagcagtagttacatcacctgtagtagttgctgcattaatattatttaaaccttcttcatatgctgctctaactggttctatatcttttcctttttcttcatttgtagtcgtattatcattaaggatttcagttattttattttgcatttcatttagcaattccgctcttgcattcgttttaacatctgttgatgcttgaattgggtcgatggcttgaattgcattatcttttgcagtgtttacatcatcgattgattgtgcattttcaatattttgattaccttgcgttaattgtgcatctacttgttgatttgcttgttctttttcttcagtagtcgcatctgcagtttgtgcaataagtgctttttgttcctttgcttttgttgctaattcatctttagctacatctttaattgtcgtatcagcagtaataccttgaatgtcagcaactgcttgatctttaatttgtgtaacatcgttagtcgtttgcgcatttaaaatatcttgatatgctttttctttagctttagaaactaaatcttttgctgcatttttctcttcagtcgttgcacctgtagtattatcaattgcttgattttgagttgtcacagcttgatctacttcatttttcgcattcgatttaactgctgttgctggttgtgtactttgaatcgaatttttacctgcatctttagcagtgtctacaccattattgtcagttgcagctgtaatgttatttttcgcgtctgtaactgctgttgctagttgttgaatcgccgcttctttttcttcatttgttgcgttttgatcgttattaataaccgctgtttgtgctgcttgtaattgatcgatctcatctttcgctgcttgtttcttcataacttttggtgttacagcgttaattgccgcttctgcattagtttttgcctcatctacttctgcatttgttgtagctgctgtgatggcttgatttgctttagcattttcagtattagcttcagtttctgctgcttgtttctcttcatctgttgcatctggcgtagcttgaattgcttgtaacttgttatttaatattgtagtgatttcattacgtgcagtagcttttttattaacagttggtgtcacttgatcaatactagcttcacctgttgtcttcgcttgatcaacttcattttgactattagcagtctcaatgtggttgtttgcttctgttactgcattatctacgttcgcattagccgctgcaatttcttctgctgtaatctcttgcgtttgagcaatggctgctttacgttcattcgctttcgtagcaatggcttgtttcgcatcatctttcgttgttgtcgctggttgaattgcttcaattttagcaatttctgcatttttagccgcttcaacttctgcatttgaatgtgcaccatctattgctgcatcagctgtcgttttttctgtttgaacttgttgtttcgctgctgttttctcttctgttgttgcaccgttattagcatcaattgctgtttcttgcgcttgtactttatctgcaattgcttgtttcgcttgaggtttaacatttgcatcaggtgtaatggctgcgattgtagcttcatttgtagtttttgcattatccacatcattgtttgctgcggcattatcaatatcagcgtttgcattaactactgcttgatccactttatctttcgctgcttgttgttcttcagtagtcgaatcattcattgcttcgattgctgttttacgttcacttgctttttgagcgatttccgcttttgcatccgatttcttagttgtggcagcttgaacttgattaattgcagcaatgctattgtctttagctgttgcaacttcactatttgaatttgctgtatcaaggtttgttcttgcttcttgctttttagtatctaattctgtatatgcagcttgtttttcttctgtagttgaagcattgctattttgaatttcttgtttacgtgtattatatgcgttttctacttctgtatctgctgcaggtttaactcttgcttgtgtttgaatggcattgattttatctaatacttttgctttagtatcagccacttcttgttgtgatttaacaacttggatgtcatgtagaccttctgtttgagctgcgtctaccgctgcatcagcttctgctacttcttcatcagttgcatttgaaactgtagcattttgcgcttttctagctgtggcagcttgtttcacttctttataagcatccattttagtttgcgtagagtccgtaatattctcaattttgaatatttcttcgtttttaactctttctaaatcttgtgcagtcgttgtcgcttcaattgctttaacaccagaaactttagctgcattaatacgctcaatagcttccgctacttcttcatttgttgtgtcaggatttaaaggtgcttgatcaatttgtgcttgaacaacttcgtcaaattcttcaagagctgctgctttagctgttgtagcaggtgcagtttgattaatatcattgattgcttttgttttaatggcttctacttgtgcatttgttgttgctgcatcaatatctttaattgcctttgtttcaattttaccaattttatcatttgctacatctttttcatcttgtaatgatgcatttgactttttaatttgttgtttacgagttgtaactgcttggataatatcttgtttcgcttgaggtttaactgttggtgtaatcacatcttgttccaacactgcgataccattatctttttcagttgtgacaccttgtgctgttgtttgtttattaatttctgcgattgcattatttttatcattgttaattttagtcacaagcgctgcaacttcatcttgcgtaacttttttactttgttgtgctgctgtaaccttttcttgagctttagcatctaattcagcaattgctgcttgattatcaattaatgcagcttgtaatttagttactaaaccatcaatatccgcttgagatgcacgatttgcagtttcaacatgattcgcatcttcatttaaaatagtgtctgcttgttgtttaagtttattgtattctgcaattgatgctgttgtgtaatgactatcatcaacttgtgagttaacttgttgttgcaacgcatctttgttcatttcaaccgctactgaaaatggatctgcagttagtgtaacttctggttgcgcattattaattacaacatctgaagcagtacgatatgttaatttttcattaaaatcaatatttttaggtgtatcaatattcgcaacattaactttatatgataattttaaagatttatctgggaataaaacttctttcgtatgtgtaccacgtgctgttgtcacaccttggcttgtaaatgtaactttatttgcattttgatcataattgacagtcatatttttcaatactgtactgtcttcattaccattagggaatgttgtagttaatgaatcattaacgtaagttacaccttgtggtaatgttacttcatatttaaattgatctgctttcaatgaagcaccaaaattaccattgttaccgatttcagtattaatagtatattctttattgttagttgctttcggtgctaaatctctatttttgacatataaatgcgatcctgagaatagacctacattatcaatgaatgaatagtatttataaccatctttatttgttgtaattcttgaagcatcagcaactgctgtattgtcaggaataaattgtaaatctaaacgatcagcatctgttggtactttaaataagtgtgcagtaccagtcttagctacatttacagttgctaattcagtatttttcttagcatctttaataactaaatttgttgcaccttgcttactattcgtttgcatagtagtaaagttaataattagttctgaatctggttttacgtttacagtttttgaaataccgttaaagttaccatgatctgtagaatcatttgcattcacacgacctaatgcagctacattccctctagcttggtagttttgagggttattcttatcaaacatatcgcttcgtcttaattcggagttaacgaaaccaatcttaccattgttaattaatgaataaccatttacatgatctgtaaccgttacagttggatcctgtctgttatcatttgttgaaatggcagggtcatcaaacgttaatgttgtattaatactgccttcaccagtattgctagcatttggatcttgagtttgtgcgtttgctgctacaggtgctgctggttgcgctgctgctggagcattcgctggctgtgtttgatttgccggtgttgcattattattaggtgttgcttggttatttccttgacctgcttggtttgccggtgctgcttgatttccaggttgtgcttgtgcagcgttattcggatcagcttgattaccttgtccagctggttgtgttgtacctgctgccggttgtgctgcgcctcctgctggattagcctgtccaccttggtttgcaggttgtgctgctggttgtccttggttggcaggtgcagctggctgtgctgtgggattagcttgagcaccagcatttgcgttaggctgtgcactggcatcagctggttgtgctggttgattttgtgcaggctgattttgctctgctgcagacgctgttgtcgggttaatagatataaatgtaacagtggcaattaaagctgaaaaaataccgacattaaattttctaatactaaatttttgttgtctgaataaattcattaagtcatcctcctggttgattattctcgctgttaaatgatgtcacttaatcaacttttaagataaacagtttgcttccatcttataaaagtcagagcaactctatctaattaaaattaattttatcatcattatatattgcttaccagtgaattttatattacatattgattactttgtttttatgtgttctttattattttgtctttacgaaataatattcttgctttaatcaaattaaaaaaccgatgcatacgcatcggctcatttgtaatacagtatttatttatctaatcccattttatcttgaaccacatcagctatttgttgtgcaaatctttcagcatcttcatcagttgctgcttcaaccatgacacgaactaatggttctgttccagaaggtcttactaaaattcgaccttctccattcatttctacttctactttagtcataacttctttaacgtcaacattttcttcaacacgatatttatctgttacgcgtacgttaattaatgattgtggatattttttcatttgtccagctaattcacttagtgatttaccagtcatttttattacagaagctaattgaataccagttaataaaccatcaccagttgtattgtaatccatcataacgatatgtccagattgttctccacctaagttataattaccgcgacgcatttcttctactacatatctgtctccaactttagttttattagatttaattccttcttgttcaagcgctttgtaaaaacctaagttactcataacagtagaaacaatcatgtcattattcaattcttgatttttatgcatttcttgaccaataataaacataatttggtcaccgtcaacgatttgaccattctcatctactgctatgattctgtctccatctccgtcaaatgctaacccaaaatcactttcagtttcaacaactttttctgctaatttttcaggatgtgtagagccacatttctcattgatattatatccatcaggactacatccaattgtttcagtatctgcctctaaatcaccaaataagaatggcgctagtgatgatgttgaaccatttgcaccatctaaaacaattttcaaaccttcaaagttaacatctactgttgattttaaatagctcaaatatttttgtgccccttcaaagtaatctgaataatgtacaatatcattgccaactggtcttggtaattctgggttttcttgatccaataatgcttcaatttcattttcttgttcatctgatagtttaaaaccatctgatccaaagaatttaataccattatctgcaactggattatgagaggctgatatcattacacctaactctgcacccatatcgcgtgttaaatatgcaacacctggtgttgaaataatacctaatcgcatcacttctgcaccaattgaaatcaaaccagctattaatgctgactctaacatttcacctgaaactctagtatcgcgacctacaagtacacgtgggtgtttttcacctttattatgtgctagaacatagccaccgtatcttcctaatttaaatgccaattcaggtgttagttcttggtttgcgacacctcttactccgtctgtaccaaaatattttcccattgtttactctcctttaatttagctatttattttacatttatataagccttcgtttcacttggttgtgctttagtgacatgttctggtaaattgatttttacagtcttttcagttgattctgaaataccatctaaatctacttctgcatcaacttcgcttatattttgtaagtcatctcgactaccgaagatttcaatttctttatcttctaaatcaatcgaacttaactctttatcatctgctaaactacctttctgtttaacatttactttaacctttttgctaaaaggctctactttaacttgtaaattcacttcattaggttgaatcgatacatttaatttattcagttttttatcaaaagccgttacttctgcgacatcttttgtgtcaccattaatctttttattagttttaaaagtggcttttaaataagcgatatcattcaattgttcttctccacctgttactttaactgtttgtggtgaaacttcttgctttgtaattttataaagtggatcaatatcactctgacttacatcaggttgaactgtcatctttttagttactttgttttcaagcgtaatatttgctaatttaggttttacagaataatgaatgtcatcagctaaccctttaacttgatacttctcttgatactttccagctttagcatttgataaatcaatcactactcttaaatcttctggattttcaatttttattatctttgattgtggtcctgaaatagtcacattaactgtttcaggcgcttttgttaaatgcaaatctttagtgttataaagaatttcaacgggtacatcttgaatcgttttactagacttttgaccaagattaccagtgttaaagatatttccaaaaacattgttaacagataaaaagaaaaacaatgccaaaagaaaggcaataaatcttaagccccatttactttctagcatattatttcacacctttcttttgaaagcgtgtgccaaaccaatgttcagcaagcaactcttcaaaaatttcgtttgaaatgtctcggcgtaattttccatcaaatgttaccgaaatatcaccagtttcttcagatacaataacggtaaatgcatcagatacttctgaaataccaaccgcagctctatgtcttgtacccaaacttttagatatcttaggactatcagacaatggcaaataacttgctgctgctgcaatcttagtgccttgaataatcattgcaccatcatgtaaaggtgtgttaggtataaagacattaattaaaagttcttgtgaaatatttgaatccattgcaatacctgtttcaatataatcttgaagacctgtttctttttcaaagacaattaatgcacctatacgtcttttagccatatattgcacagcctttgaaaccgattgaatcaatttctcttcatctttactatacgtattagaagtatagcgttttaaaaagctacctctaccaagttgttctaacgcacgtctaatttctggttggaatattactattaaagctaataccccccattgaataacgatatcgaataatttagatgttgcagtcaagttcaatatcatacttatctgctgaccaataacaattactaatatccctttaagtaattgtatcgctttagttcccttaaagaccgtgatgagaagataaagtacataccaaactatcagtaaatcaaggatactcgttacaatttttaacgtactgaggttttgaaaaaagttggaaaaatccataacatctcctccgggtaatatttttccataatacccattataccaatcatttacatcactgtcatacgaacatatatttaaatagaaaaaatttattttaaagattataactactcttaatcattttagtgaattaaaaaaagtagtgcaaaaagcaaaatatactttatacactacaaatcatttatttataataaagtttcaccaaaaaatgttccaattaatgaaactgcctgctcagcagtatggttattatgatcaataagtggattcacttcaactaagtccattgaagtaactgactgagactgatgtaataattccagcgcaaaatgactttctctatatgtaagtccgcctaagactctagtacctgtgcctggcgtttcaagtggatctaaggcatcaacatctaaagataaatgaacgccatcaacattgcgtgacttcaaatattctattgtattttcaattacttcctttatccccaatttatcaatatctgacatagtaaatgttttaatattatgatctttgataaattgtctttcacctttatctaaatctctcataccaattagtacgatgttttctggcttgattacattactatttaattctaaaagttctttaggaccttcacctgtcaaaatccttagaggcataccatgaatatttccacttggtgactcttcaggtatatttaaatcaccatgtgcatcataccaaataacacctaaattattataatgtttacttattgctgatactgaacctaccgcaatagaatgatctccaccaagaactagagggaatctgttattttcaattgatgctgatacttctttatttaatttttgagtaacatctataatttcatcgtagtttcttaatccattttgttcactttgaaatttttcaatgtctacagctgataccttaatatcccctttgtcattaacatcaaggtctaattgctttagtcttggtattaaacctgcatatctaatcgcagttggtcctaaatcaacacctaattttctttgtccaaatgttgacggtacaccaataatatcaattccttttttctttgtcataagcgtccccctttgttatacataatttcagaataatgtatacgcttactataatcaagtaatagccataacataacgccttagcatcctaattctcaaaaaataaaaaaagcacttcccaagaatggaaagtgcaagtagtgagccatagaggattcgaacctctgaccctctgattaaaagtcagatgctctaccaactgagctaatggctctaatggctgggctagctggattcgaaccaacgagtgacggagtcaaagtccgttgccttaccgcttggctatagcccaatatatagatggtggaggggggcagattcgaactgccgaacccgaaggagcggatttacagtccgccgcgtttagccacttcgctacccctccagcttattcagttaattaataatcaaaatggtggagaatgacgggttcgaaccgccgaccctctgcttgtaaggcagatgctctcccagctgagctaattctccaatataatgactcctacgggactcgaacccgtgttaccgccgtgaaagggcggtgtcttaaccgcttgaccaaggagccatggctccacaggtaggactcgaacctacgaccgatcggttaacagccgatagctctaccactgagctactgtggattaatattaatgcctggcaacgttctactctagcggaacgtaagtttgactaccatcgacgctaaggagcttaacttctgtgttcggcatgggaacaggtgtgacctccttgctatagtcaccagacatatgaatgtagattatacattcaaaactagatagtaagtaaaattgattttgcttcgcaaaacatttaaatttgattaagtcttcgatcgattagtattcgtcagctccacatgtcaccatgcttccacctcgaacctattaacctcatcatctttgagggatcttataaccgaagttgggaaatctcatcttgaggggggcttcatgcttagatgctttcagcacttatcccgtccacacatagctacccagctatgccgttggcacgacaactggtacaccagaggtatgtccatcccggtcctctcgtactaaggacagctcctctcaaatttcctacgcccacgacggatagggaccgaactgtctcacgacgttctgaacccagctcgcgtaccgctttaatgggcgaacagcccaacccttgggaccgactacagccccaggatgcgatgagccgacatcgaggtgccaaacctccccgtcgatgtgaactcttgggggagataagcctgttatccccggggtagcttttatccgttgagcgatggcccttccatgcggaaccaccggatcactaagtccgtctttcgaccctgctcgacttgtaggtctcgcagtcaagctcccttatgcctttacactctatgaatgatttccaaccattctgagggaacctttgagcgcctccgttaccttttaggaggcgaccgccccagtcaaactgcccgcctgacactgtctcccaccacgataagtggtgcgggttagaaagccaacacagctagggtagtatcccaccagcgcctccacgtaagctagcgctcacgtttcaaaggctcctacctatcctgtacaagctgtgccgaatttcaatatcaggctacagtaaagctccacggggtctttccgtcctgtcgcgggtaacctgcatcttcacaggtactatgatttcaccgagtctctcgttgagacagtgcccaaatcgttacgcctttcgtgcgggtcggaacttacccgacaaggaatttcgctaccttaggaccgttatagttacggccgccgtttactggggcttcgattcgtagcttcgcagaagctaaccactcctcttaaccttccagcaccgggcaggcgtcagcccctatacatcaccttacggtttagcagagacctgtgtttttgataaacagtcgcttgggcctattcactgcggctcttctgggcgttaaccctaaagagcaccccttctcccgaagttacggggtcattttgccgagttccttaacgagagttcgctcgctcaccttagaattctcatcttgactacctgtgtcggtttgcggtacgggcacctattttctatctagaggcttttctcggcagtgtgaaatcaacgactcgaagacacaatgtcttctccccatcacagctcagccttaatgagtaccggatttgcctaatactcagccttactgcttagacgtgcaatccaatcgcacgcttcgcctatcctactgcgtccccccatcgattaaaacgattataggtggtacaggaatatcaacctgttatccatcgcctacgcctgtcggcctcagcttaggacccgactaacccagagcggacgagccttcctctggaaaccttagtcaatcggtggacgggattctcacccgtctttcgctactcacaccggcattctcacttctaagcgctccacatgtccttacgatcatgcttcaacgcccttagaacgctctcctaccattgtccaaaggacaatccacagcttcggtaatatgtttagccccggtacattttcggcgcagtgtcactcgactagtgagctattacgcactctttaaatgatggctgcttctaagccaacatcctagttgtctgggcaacgccacatccttttccacttaacatatattttgggaccttagctggtggtctgggctgtttccctttcgaacacggaccttatcacccatgttctgactcccaagttaaattaattggcattcggagtttgtctgaattcggtaacccgagaggggcccctcgtccaaacagtgctctacctccaataatcatcacttgaggctagccctaaagctatttcggagagaaccagctatctccaggttcgattggaatttctccgctaccctcagttcatccgctcacttttcaacgtaagtcggttcggtcctccattcagtgttacctgaacttcaacctgaccaagggtagatcacctggtttcgggtctacgaccaaatactaaacgccctattcagactcgctttcgctacggctccacatttactgcttaaccttgcatcaaatcgtaactcgccggttcattctacaaaaggcacgccatcacccattaacgggctctgactacttgtaagcacacggtttcaggttctgtttcactccccttccggggtgcttttcacctttccctcacggtactggttcactatcggtcactagagagtatttagccttaggagatggtcctcccagattccgacggaatttcacgtgctccgtcgtactcaggatccactcaagagagacaacattttcgactacaggattattaccttctttgattcatctttccagatgattcgtctaatgtcgtcctttgtaactccgtatagagtgtcctacaaccccaacaagcaagcttgttggtttgggctcttcccgtttcgctcgccgctactaagggaatcgaattttctttctcttcctccgggtactaagatgtttcagttctccgggtgtgccttctgatatgctatgtattcacatatcgataacatgacataactcatgctgggtttccccattcggaaatctctggatcaaagcttacttacagctccccaaagcatatcgtcgttagtaacgtccttcatcggcttctagtgccaaggcatccaccgtgcgcccttaataacttaatctatgtttccaccatttttataagtcaacgttaacatgaagttacgttcttttataaaaagatttaaacgcgttattaatcttgtgagtgttctttcgaacactagcgattatttcttatgaattcaagcttatttaaaactctttattcactcggttttgcttggtaaaatctatattttacttacttatctagttttcaatgtacaatttctttttagtcaagcgctcgcataagcaatatcgctttaaccaaaaaatatttgaatgttaaataaacattcaaaactgaatacaatatgccacgttattccgcatcttctgaagaagatgttccgaatatatccttagaaaggaggtgatccagccgcaccttccgatacggctaccttgttacgacttcaccccaatcatttgtcccaccttcgacggctagctcctaaaaggttactccaccggcttcgggtgttacaaactctcgtggtgtgacgggcggtgtgtacaagacccgggaacgtattcaccgtagcatgctgatctacgattactagcgattccagcttcatgtagtcgagttgcagactacaatccgaactgagaacaactttatgggatttgcttgacctcgcggtttcgctgccctttgtattgtccattgtagcacgtgtgtagcccaaatcataaggggcatgatgatttgacgtcatccccaccttcctccggtttgtcaccggcagtcaacttagagtgcccaacttaatgatggcaactaagcttaagggttgcgctcgttgcgggacttaacccaacatctcacgacacgagctgacgacaaccatgcaccacctgtcactttgtcccccgaaggggaaggctctatctctagagttgtcaaaggatgtcaagatttggtaaggttcttcgcgttgcttcgaattaaaccacatgctccaccgcttgtgcgggtccccgtcaattcctttgagtttcaaccttgcggtcgtactccccaggcggagtgcttaatgcgttagctgcagcactaaggggcggaaaccccctaacacttagcactcatcgtttacggcgtggactaccagggtatctaatcctgtttgatccccacgctttcgcacatcagcgtcagttacagaccagaaagtcgccttcgccactggtgttcctccatatctctgcgcatttcaccgctacacatggaattccactttcctcttctgcactcaagttttccagtttccaatgaccctccacggttgagccgtgggctttcacatcagacttaaaaaaccgcctacgcgcgctttacgcccaataattccggataacgcttgccacctacgtattaccgcggctgctggcacgtagttagccgtggctttctgattaggtaccgtcaagatgtgcacagttacttacacatatgttcttccctaataacagagttttacgatccgaagaccttcatcactcacgcggcgttgctccgtcaggctttcgcccattgcggaagattccctactgctgcctcccgtaggagtctggaccgtgtctcagttccagtgtggccgatcaccctctcaggtcggctatgcatcgttgccttggtaagccgttaccttaccaactagctaatgcagcgcggatccatctataagtgacagcaagaccgtctttcacttttgaaccatgcggttcaaaatattatccggtattagctccggtttcccgaagttatcccagtcttataggtaggttatccacgtgttactcacccgtccgccgctaacatcagagaagcaagcttctcgtccgttcgctcgacttgcatgtattaggcacgccgccagcgttcatcctgagccaggatcaaactctccataaaaattacgatgtttgattagctcataaatactaaataatgtttgtaacttatagttacgtttttggaattaacgttgacatattgtcattcagttttcaatgttcattaatgttcaatctcttttattatacttcatttatttcttgaagtcaataagtttttgaatgattactttatttattctatattgtttttatagttatttcaatggtaagttttacacttttgaaattcttctttaaaaacaactgcgtcgtttttgacgactttatcatattatcaactttgcaatttaaagtcaataacttttttgaaaaacattcgtgtttgcaagtcgcttctttttcaacgcgtttattgcttaacacaagaacttattttaccagcattccaaaacaaatcaacataaaaacgtacaaaataaaagtaattttgtacgtttagcatattttatacctatttatttgtggcagctattactttttgtgctatagagctataaattttacctaatctgtcttcagcttgataaattgaaggtgcaaagtcttttggattccaagacggttgctctaatggtaattcaccaagtaattgagtattgagttcatcagctaacttagtaccgccacctttgccaaagacatactctttattccccgtctctttactttcaaaataactcatattttctataacaccaagaatagaatgttctgtatgctttgccatcgcacctgcacgcgctgcaacaaatgctgctgtaggatgaggtgtcgttacaataatttccttacttgaaggtaacatcgtatgaacatctaaagctacatctcctgttccaggtggaagatcgagtattaaatattcaatgtctccccatttaacttctgtaaagaaattcgtcaacattttacctaacattggccctctccatataactggcgcattttcttccacaaaaaaggccattgatataactttaacgccatgacgttcaactggaattacttccttccctttaattccaggcttttcatcaatccccatcatatctggtacactaaatccatatatatcggcatctactaatccgacttttttaccttcacgggctaaggcaacggctaaatttactgcaacagtagatttaccgacgccacctttacctgaagcaatagcaataaattcaactggattattttgagataataagccttctatcgttttaggtttattttcttcttttggtttaaattgatttactttttcttctggtaacgtttcaaatcgtatacccacagtttttgcaccattttcttttaaaacattaacaactgccatctgtaaatctaattgcggtgcaccacctaattgtgccattgccactttaacacttacatgttctttttcttccttaatagaaacttctacaataccttctgtttcttttaaaggtacatctataataggatctttaatttctcctattagttctttaacttgatctaccgttaacaaagcaaatcccccttaatcaatttaaaatatctacatcatagcaaataacaatttttgcttagtctatcaataaaagtataaaacttttcattaaataaaaaaagaagttagcctattattttcaatagaccaactactataattattttaaaatttccttctattactttctatttctttaggttctcttataaaaagcgctatcacataagctgccataacaagcacagctacaaaagcaaatgagatatccacccctatagcaattgattgctgtttaatttcagttgcagttaaatgcgatggcgatgtagatgagaatatttttgcgccaaaactcatcaaagtaaccattaatgctgttcctaatgagccagccattacacgaccaaagttcataatagccgtgccatgtgagatttcttcatttctcaaagaattaattcctgtagtatttatcggcatcatgagtaaagaaactgaaaacattctaattgcatatacgactattaaatacgtataagatgtgtctgtatgcaagaaacacaacataatagtagtaattgttaaaatcgtaaaaccagtataaatcagtggtctaggaccatacttatcataaaatttacctgtaaaaaccgacataataccatttatgattgcacctggcatgataacaagtccagacaataatgcagatagagataagctattttgaacatagagcggtattaataacgctggaccaaccattgacatcattatgatcattgagctaatcgtacataatgcaaatgttctatttttaaaaacacttaaatttaaaagtgcattgcttatattgaattgtctacgaataaataagtagatgataatagaactaattatcattgcaccaatgactatcgggctagtaaatcctaggtcgcctgcactactgaatgcatataacattaatccaaatccaatcgttgaatacattacagagcgcttatctagcttagtatatttcacttcattatagcttgaaattgaaattaaaccgaagatgaatgcgactaaagcaattcctacaattataataaatggtactcgccaactcgcttgatcaatgattaatccagtaacagtaggcccgattgctggtgcaaattgaataactaaaccagctaatcccattgcaaatcctctatgttctttactgaataacgtaaacaatgtgaattgcattaaaggcatgagtacgcctgcccccatagcttggatgacacgcgctaccattaatacgccaaaattgggtgccatggctgcaacaattgatcctactaaaaatgtccccatcgctgctaagtataaaggtctagttttaatcctgtccattaagtatgctgttagaggtatcatgacgccattaacaagcataaacccagtaactagccattgcgatgtactttcattaatatttaattctctcattatactaggtaacgctgtatttaataatgtttgatttaaaatagctacaaacgcactaatcaacataacagcaactatgaagtttcgtctccgggttgttaattcaactttagccatcataattcctcctttgtaacaaatttacgtttattagcatatatacttaaaatatattttagattaaagtaccaactatttatatcaatggttattattaaccgtgattaattgaagcaaaacaactcattttctactatatgaataaaaagaagttggaacacatcattgcccccaacttcaaaactctattttctattatttagatttttactttcagggtaaaactgcagcttacaaacatataaaaagcctataataaccatgatgacccaaaaatcaatattgatatacacatagttcagatgaataataaaataaaataacgttgttgcaaccatataagagattaaatgaaaagttgcacctctaaaataagcattttcaggtaacatttttctaaaataatccatcaaatgttcaactgcaaatacgataaagtagccaaatataatataactaccataatatagcaaattgtcgtacatacttctgttatatgtgaagtcacctaacctaaaataaataagaattctacttaatccatatagtccgaaccctaaaaacgttaagaatatcgcaccagaaagcacaaagataaagagaacaataattgttgttaataaattataaaacttatgtttaagataattcataactattgtcctccttaccataaataatttatattgcttttaattttaagatagttgattacacttcaaacttagtaaaatgattatttgttactttatttacactacatcaattttaatcataattctattcttttgtttgtgacgccgcttctctataaaatatgagccatacaacgatgagccctacacttatcaaggatacaacgcctaaaatattatgtaagtttgcaccaaacaatcctgattttaatgcataaaggtatcccataatcgtcgaacctattgatgcgccaaggttttttgttaatccataaaacgacatcattttcttcatttgtattggacttgtttcctcttggacaattacactatcttttgtataaatatatccaaagcttagtccacttaaaattaagacacatgctataagaattggtaattttataccaaacgcaatgattatactacttaataataataatgtaaaagacgacaaatagataacttttcttgataacttcgcttcaatatggtgcaaattaaaattcaatgtaatccacgctacagaaagtggaaaaataactaatccactttgcaatggcgataaccccagttgttcttgaagatacacaggaatatataaattaaagcccattaaacaaacagctgtaagaagatctgtaataaagaccaaagtaatcattcgattaaattctgctactggtaagaatggggatgaaacttttttctcaacattaaataatcgaagtgcaactaatattgctaagacaaaacctatgatatttaaatataaatgttgttggtttaacaatgcaaacataattaaaccaatgaaaatataaaacagggtgatacctttagtatcgaattttgatttagccacagtttcttcttctggaaaatgaaatgtccagacaaccaatattattgcaataatcgcaatcggtatgtttatgtagaataaccaatgccatgttgcaaattctaatatgccaccacctagaagtggtccaatgatactcgaaatcccccaaacgctaccaacgatacccataattttatagcgtaatggaatttcaaatgctaatttaggcacaatttgtgacaaggacatcatgacaccagatccaaacccttgaattacacgtgatataatcaacatactaaaatgtgtgcttaaacctgacattaaactaccaaccgtgaatagtgtaagacctgcgatagcaatataaataattttaaaacgagttaataattcacctactattggattcgcaatcactaatgcaataaagtaagccgtaaatattaatgaaattaaattccctgcatttaaatcttgcttaattgttggtaacgctaaagaaataattgatgattcgattgcagccataaacatgattaatattaaagctattacagttacaattgattttaaacgcatgctatacctccttctatatatttataagattttatttacaaactattgatttttatatgtataaacacttttgactttcaaagcttaacgataattttattacaaaacaatcctctaatagaatgatttaagtaataaaaaaagcggagttccccccaccttttctaaacgactacataaaatataagattgcaattaaatgcaatagtgatgctataacaataaaaatatgccatatcatatgaaaatatggtctgtttttttgtgcatagaaccatgcaccaatcgtatatgacacaccgcctaagaaaatgaataatatgaatatccatgatgtgcgaataaaaataattggtaacaagataatacctacccagcccatcactaaatagacaattaaacttaacttttgattaactttgacagctatggatttatataaaattccccaaagagtcgttccccataataaaataaatactgtccaacctatccaaccacctacaattgttaacaaaataggcgtatatgtacctgaaattgctacgtaaatcatactatgatcaataattcttaaaatatatttatggggcgtttcattttgcatagagtgataaattgttgatgaaataaacatcataaagatagaaataacataaattgacatactaactgatgcaagtgtgccatttacaatataactatgtacagccgcataaggtagcactaataatgttaacaaagctgcaacaccatgagatgccgcattaccaatttcttctccaaatgataaagggatgatatccttaaatgtttctacgattgtgtcattactttttttagttgatttggacatcatagtcaccgcctatcattaaattaaacccattctacgtaaagcttctgttgcagttgcaacactatctttaccttctttatttttaagaggtgaaaattcttcttctctaggaacttgtaacgtgacaaaactagttccataagtaaatatgtcaaaataaaacaattcgaattttaaagttggttgttcaataacaccaaagttctcatctaattgcttcaaattcttaatagctaaatgataaggtaattcacgatttacagcatttaaaataaaaccaagtttaaatgcatgaataccgatattagcattgttaaattgatttgcaacttctggatctaattctgaatactccaatactgtatctttacaatcgacattaactaatcgcccaacactttctcctggttttggttgaatcgttttagaagtaatatcgtaatcatgttctaccgtaaatcctgcaaatagtggatccaatacttttactaaaacattatcgatattattcaagaaaatatacttaacgccattattagacatttcttctaagtatcctgccttgtctaaagatttaaacacgccaccattaccattcggcgtttccataatacgaccctgttgatttaaaattaattgtcctgcttcactaagcgccacaatattatcttgcttaaagaaatgtattgcttcttgatcataaccaaagtagttatgtgattcaaaataagctaaagtttcttcatgattgatatcacttgtcataatgtaccattgaatcatatgaccagtttgtcgatgtagttcttttaattgttttgcctgaagttcaaataaacttacaccttcaatttcgaatgaacctttaggtcctttatatccaagtcttgttccttgtccacctgccatcaaaagtactgcaaattgtccttctttaatagcttgaagtccttgttcctctaaacgcttaatctcatcatcactcatttgtgatttaatatcatatttcacttcagaaactgcagatacatcatctattgttttcttattgatgtataaatcgttatataatttggcaataaaatctaaatctaatgacgctaccttctcttcaagcgcttctttttcattgttactcattattttttcatattcacataaatgatcttgtttatatttagctaattgatttttatctagcattttatgcctcctgctgagtttgtaacctttaataatttattttctataaaaacttagtattccagttgcttattatatcattgatgaaaggctgaaataaaacataaactgttccgaccattaacgcagtagctaaagataagtctacaagtccacctgttttaaattggattggtgtcttcacattaaacggtaacggataaaataatttcacgccttttggtgttatcatatctagtataacatgtgacactaatccaattataattgctgccatataataattaggcgtctgaataatttgcaataaaaatgctatgattgcgataaataatattgaatgcgtaaaggttcgatgtccaaagatcaatctcacaaaaaaactaattaccttaaaccttctgccaatcttactttgagtgtgacatatatcgggtaataagctagctagagttgctagaatgataaccgtaaccgacgaaaaaatatccgtttgaaaatattgtgttgttagcgctccaacgagcatgccgcatgaagcatgtgttttacctgtcatatttgttctcctttaatactcacattttaccataaattcgccaaaaacacgaacatattttcgggttgggcttcattagtatgacacaatttaaaaaagtatcacataactcttgaaaacgattacaaaatcgtttatgatgtatttacaaaatatttaaaggatgtgtttgaataatggcaatgacagtaaaaaaagataataatgaagtgcgtattcaatggagagttgctgatatcaaaattcctacaagtgaaattaaaaatattacacaagaccaagatattcacgcagttcctaaattagacagcaaagatgtatctagaatcggctcaacatttggtaaaacgaatcgcgttattatcgatactgaagaccacgaatacattatttatactcaaaatgatcaaaaagtttacaatgaattaactaaataaattgtataaaaaaatcattcatggtgagggcttcatgaatgattttttttaattgattcaacacccagcataaacaaatacaaaaggacaactgtttccacaattttaacagttgtccttttctatatctaattacaataacaagtgtgccatcaaagaaataatcggtagtgtaatgattgttctaatcaagaaaatcataaacaatttgccgatgcttacaggaatcttggaaccaagtatgacgccacctacttctgacaagtatattaactgcgatatactaagtgccccaataacaaaacgagttatatcattttgtacaccttcaattaatatagaaggtaaaaacatatcggcaaaaccgataataatcgtttgagaagcctgtgccgcttcaggtatttgcattaactctaaaaatggaacaaaaggtttacccaatatgacaaaaaagggcgtgtagttcgcaataatggtagcaatagtaccaatactcatcacaacaggtaaaataacaaaccacatatcaacaaccgttttcaatcctgacttaaagaagtcaacaatgcccggtgctttaatacctacttctgttgcagtatcaaagccatgtctcaatgccgtctttccttctggcaatgcctcagtacgcgcactttcgggtacctccttagcatactcatcaggaattttatttaaaggccaaattcttggcataatgactgctgcaacgaggcaggatactatcactgataaatagaaagcaaaaaattgattttgcatgtgcactgtttcagcaactacaattgcaaaggtgatagaaactacactaaatgtagttgaaataactgttgcctcacgacgagaataatatccttcaccatattgtctacttgtaattaagaccccaacagttccgtctccaataaatgatgctaaattatctaccgtcgaacgtcctggcaatgtaaataaaggtctcataaccggtctaaaaataggacccaacatctctaacaaaccgtattccattaatagtggcaaaaataatgccgcaaataagaatactgccactaaagttggcaataaactcgagaacaataatccacccgtttcatctgaatatattacttttgaaccaattcgtaaaaatgtcatccacgcaaagacaacggcaagtaatcgcaaaattaaccaacctattcttacattaaacgcattatgcaataatccatcgggtttcaatttatcttttaaaatagttgaacaaatcagtgttatgatacccgacaaagtaattatcgtcacaattaaaaatggcattacgccacctaatacatctttaagcacgcctgctaaaaatgccactggcaacgttgtttgcttctgtccatcttgttcgactggaattggtactagaaataataagataccaattaaagacatcgtaataaacttaagtctcccaatgactatctctttccttgaaaagctatccataaaatcaatccatttctctatgtattcgttttaagtatatacagaattctattcagttaacaaacatattccttatcattatatctttcaaaatgtttatgtatgcaaaataatgaataattacagttattaaatatacgctatttcttgtaatttttcaagatgaattcaaaaaaggttaagtacaattactgatttcgtacttaaccttttttaaactctaatcatatgttagttatttcattcttcgtaataatattaagaagtatggtgcacctataattgcaatgataacccctacaggaatatccagtggcggatgaatgccacgggctaaaccatcaccaaatgttaacaatatagcaccaattaaccccgacatgataataacgtgtaatgttttatttcctattaattgtctcgcaatatgaggtgcaattaatcctaaaaagctaataccaccgacaactgaaattgcggatcctgctaatattactgctaaaattagcaatagcattttaatagttttaacttttaaaccgagtgcggttgcaacagcatcacctagattcaatacatctaattgataactcaataaaatgatgattggtatcgttattaaaaaccaaggtaatatagtataaatattcgacatatcatgaccatatagactacctgtcaaccaaacaagcgctttgtttgcttccagtggatttctgattaataagaactgcacaatcgccgtacatattgcgcctattgctaaaccaattaaggcaagctttgaacctttaacatcatattttgaaattaaaaatgataaaaataaacttactgcaaaggcacctaagaatgaacctataggtaatacaaacaatggtgctgttggaaagatcataataataatcacagcagctaaactggcacctttagaaatacctataacatcaggtgaggctaacgggtttcttattacagcttgtataattgcacctgatatagccaagctactaccgataataataccaagtaacgttctaggtatacgatactcatttaaaataaaatcatcttgtgtaaagattcccttaatagcatcaatcgggtgaatcatgacagaccctacacataaacttatgaatatactcacaattaaaaggattgtgattaaactataacgacgtataattttcgttgtcatcatattcttttcacccctttaatcgttataaataagaagtaaagtgcacctacgaatgatgtaacaatccctactggtgattcataaggatatgtaattaaacgacttaatacatctgatagtagtaataaatctgcacctataataaatgttaatggaatcataactaagtagtttttgctgacatagcgcttgacgatatgtggcacaattaaaccaacaaagccaattggtcctgctattgatacagacatacctgtaagaataataactaatagtccaatgatgattctaactttatttatattttgacccaatcccttagcaatatcatcgccaagttccattatcgttaactgacgaccaataaagactgttgcaattaatgcgccaataagccatggtagaatggttaaaatctcatcccacttcatactggataatgaaccaacaagccaaaacatcacttgttcattagaattttcatttaagattataatcccttcagtcatactactaaaaaataaatgaatagccataccagccaatgctaatttaattggcgtcatgccttttgttgcaccagaaagtgtgtagacagttaatccaccaataaaggcaccaatgacacctaaataaagtgcatagtattctaatgatggaataataatcgttactaatacaatgacaaatgacgcgccagaactaacaccaaaaatctttggagatgccagtgggttacgagtcattgcttgcattaacaacccagaaacggctaacgcaccgccaataaataaacctgcaagcattctaggcatacgtacattatgtaataaaaacgttgcttttgtatccgtatgaccagtaacatagtgaacgatatcgctaaaattaatttttgaagaaccaattgccatatttaaatatacacaaataaaaagaaagcacacactcaccatatacgtgagtgttgtgcgtctttttcttttatgatctatggcagattggctacttaattcttttatagccatttacttccaccttacttttgttctttttttgataattcaacaagttctttagccatttcttcagaagaaattaagccacgagatcttgcccaaacatcacggtcaacaatatcaacgcgattatttttaactgcattcaattttttccatgttgcatcttcttgtaacttcttgaattcagcagaatcttttttagcattatctgtcataataatcatgcgttcaggatttaagtcagctaaatgttcagtatctaattgtaagtaaggtcctttcaagtatttacttaaaccttttgttacatcatcacttaatgcatttttaaatccaagttcgtttaaaaattgtccaacatatgaatagtttggatgtgctaataaaccagctttcgcaacaactgctggaagtactttttgatttctatcaaatttaatttcatctttatacttattgattaacttatcatgttcagcaagacgtttttcgccttctttttctttatctaaagctttcgcaattgtcttgaaagcatcgatattttgcttgtagtcaccatcaaaactctttaatgataatgttggtgcaattttgtttaattctttattaattcctttatgtctactgctatcagcgataattaaatccggttttaatttactaatttcctctaagtttggctgtttacgtgtacctacagaagtataatccccaattttttctctaactggtttaatgatacgttttttcttaccatcatcagcaataccaactggtttaacgtctaatgctgctaatgcatctgcaaatgagtactctagtacaacgatacgttttgcatctttaggtacttttactgtaccattttcatcttttaccgaaatagtatctttagttgatgattcttttttacttgaattatccgtattaccacaagctgcaactaaaaataaggcaactattaatcccaatatactaaaagtttttagacctctcatcgttccactccttaatatgtataacttcatttattattttattgataacaattatcattgtcaagtagcgttcaatctttttatattactaaaatgtatgactatatttattccctctaataattatgactacaattagcacatttccttagacaaaatactgataatgtatcatggctatatcatctttgaattaatacaattgacaccatttagcatgaccgttatctctttaattcagctgatattacctattgcagttttatgtgacgaactgttgcacttaatttgataaatcattaaatacaaaaaatctaagttgaacaattatcatacaaccgtgtaaacgatatgtagtataactagtcaacttagacttattgataaatatattaatattggttcaccatagcaggagatttcacatcaaaattttgaagtagcgtatcaatctttgaatcatcaatatataccttatgtaaatttttcatatacatcgaatgagaaagtgcttcataattaagtgaaaaactaatatgatctccaacttgatagtgtccttgaccatttaaatcaagcattaaatgatcactcgaagcgcctaaaatattgatatgctgatccataggtgaaatattatcgacttttgtatctaaataaccaatatctacaattgcttgtatgaatgattcatgcgtttgtgtattaactcgaggtttaatttctaaaatctcagcctccaatgtaatcgcatcttgatataacatagctatcgcttgatttgtcgttgtatcaacacctctaaacaacgtttcacctattcgcaattcatttattttacccaaatcattatataaaagttgtggtaacatgctcgaattaccacctgaaataattttcaatcgatatcctatttctctttcaacagctgagacgaatcgattaatcataaagatatcatcatcacttggcgcatcagatttaaaacacataaaattgaatgctaaaccaacaaaatggatatttttcaagtgaataatctctttaatataatctaaaacatcataagtcagaacaccctcacggccatctttccaatctaccattaataaaatcttatgtttttttcctaaaacttctgctacttcatttatatgatgtatggtagataattctgtttggatactcatatcaactttttctatcatatctgaaatctcttttttggcaggtgtacgcaataacgtatatgttaaatcctgatctgcaatactaattatgttatccaatctggattctgcaacatgattgatacctaacgcttttaagctttctacaattgtacggtcaccagctatgcacttaattactggtgtgaattgcatatttttactttgaaaaactgtttgaagtactttggcgttatatttaatcttcgatatatttatgttaacgtgtgccatgtagtactacacctctttttttatcggattatctaactcaatatttaaatattgctttactttattttccattctcatatttaacaacgctttgacagtaattgttggtccaaacaaaatatcttttaactcatttgcatgtggtagtgttgggttaatggcatgcgctactacttgctgtactatgttaaataattcggtttcttcaacacaatcatactgattaaaatgatggattaattctgccatttgattttgaataacagcatgttggaattttgcaatcactgcatctatagaatcagctattaaactatcatttgtaattttaatatctgatacacgatgttgtaatgtttctaaatcaattctagaaccacctaaatctctcactaaaaattgaatgtcaaaatgtggccccaagttcactactgtattttgcatgtgtgcttctaatgcaattccataattttgaataaaagcaattaaaggcgggattaatgcttgagcgtatcgttcaataaatgtcgtaatactttctttagtaattccttgatttaaccactctaagtaactatccacgataactttttggtctattggatttttattaactagacttgcactaactactgttgcaccttttccatcaatttcaggcttttgtcttataatacaagcaagctgacgtgccctatctttatcaacatttgcatattcaccgaacggttccatagcaactttaaatcctggatattgattcaacatgttttgtaaagcataacttaactttggtccatctacagtagtcacagttgagactgttctaacggcacttgttgcttgtgcatcgatgggcaacttaacatgatatggtttatcaattaaagacatcgtcctgaatgataaagttgcttttgaaagtattgtaaacggcgttggaattaatatttttttagcaatccatgcttcaaaatatttccctatcgtatgatcatattgccaaggatgtactaaaatcgctctatagtcttcacttttcaaacctaaactctttaaaaacacacgaatctgattgtagtattcgggaattatttcatcaataataaattgatcattaccatccatagctgtgcacacaacatggtctttttcaatcatcataatttgcaaagggatttctttttcaaactcaggtgcatatgctcgtacttcttccatagttaagggcaatttcgttttggttaaagggtgtgttggatgcccctctggtaccaaactctcagaataagttaaatcatctgtcttatcactatcttttacatgttgtaaccatgaaaaaaagttaatatcttgtggtaatcttgaaaatttaaaactttgacttattaatgtttgtctgtgagacatttgcttatatgtttcaactaaactatctcgactgtgtattaactcttcgcgtagtcgctctgaaatagggatatcaaagtcatgattcaacacatctagtagcccttctaacgtcatgattagcgacgtttcacctttatttaaataagtaatatcacctgtaaactcatagcgttctaatgcactttttctaacaacttcaatagtcaacacatgcatatgatactgaatttcaattaaagatcctttttgcgaaataaatgtttgctcggggtaaatacgttctttaataatggcgttaattacacgatattgaatatttctatctgcctttgcccattcaagatataccatgattactttcctccaactttaacttcaactttctatttataagatagaataccattgtaatgcatatagtacttattcccattattgaaaaagttctaacaatgccaaacacatctgcacatatactcattaacagacttcccaatggaatcatacctctatccatcataataatactcagtactttaccacgttcataatctttaacattattttgaaaataaacgcgatttgtcgtacgtgcccattgactaaataacccaatcaatgtaatacaaatgaacatgatgacaatattgtgaaataccacacctaacaaagcaataccaaataaaaatgaacttaaataatacatatttaccataccaatatatttaagtactttaggtaaaactatcgttgcaataataccaccaatggcacacatcgtcatagcgataccaaatatttcagatttccccggaaatactttgtttgttaaaactggtaaaagtgtcgtatatgaaaaacctgtcgccataatcaataatgatgttataaatatttgtcgaccttccatatgtaatttgaagtaatctataatgacttttaacggcatgtatcttgctgcatcttcaggtattttagttactttaaaatgtaatggtaaacataataaaactgcgataaaataacaaattgcctgtgcaagaaatgttgttggcgcatgatagactgctaatatgacaccagcaatggcaggccctattgaacgacaaatattaatgatgaatgaatgaaatgatacagcttgtgtagtagatattttatctgataaatctggtaagattgcttgtcttaaaggtgtttcaaccgcacttaaaatccctcttaatgtcgcatatataataatgacgctaattggaattgcagtgaaactatacgtaagcacacataaaattgcagttactaaaaatgatgatgaaattgtaattctcagcaatcgccctttatcatatttatcggcaattgcccctgcccacacacttagtaataatattggtacaagtctgcaaaaattgacaattcccagataaactgcgttatgataagtggtaagtacaaaccaatttagccctatttgtccaatccaattacctagaaatagtagaaaagaactgctaaaaaaatattttgtcataaaacttacacccgcattctgttgataataagaatcattatcattaatatggattatacaaatctatcttgcttttgtaaaatatttcatagaggtgaattatgaacttgaacttaatttttaaagaacagacattaaaatttaacaaagaagaacaagaaacatatttatttttacaacaacataatagcgattgggctaatatttttaaagagatgattttacaaggaagagataaagtcactcagagattagtgacatcaatgcatcgcgaaaacttagttaaagcgcgcactcaaagtaagaaaatattgagtcgtgatttgattatgttagatatctcaacgactcatatactagaaatccagtttccacaagctaagcaaacattatatgctcctatcactggagaacacgcctttgatcgaattgatgttgaaggccctttctacattaaagataacattacaaatatgattacacgagtacaccatcctaatgaaattcttgagtgtattttaattgaagaaccagatttaaaaaatgctgctagtgatcaatttcagcaagatttaataaacagtgcaactaatatgacatttgcaattagctaccaagcactgtcaatgcaacatgattctgcacctttatttaatattatcgaaaatagcgaagatagttacttgcgttcagagcaagccgttattgaaggtcatccgctacatcccggggctaaattacgtaaaggtttaaatgcattacaaacattcctatattcttcagaattcaatcaacctattaagttgaaaatagtactgattcacagtaaattaagtcgtactatgtcactgtctaaagattatgatacaactgttcatcaactatttccggacttaattaaacaattggaaaatgaatttacaccaaactttaactttaatgattatcacattatgattgtacatccatggcaattagatgacgtattacattctgattatcaagcagaagtagataaagaattaatcatagaagcaaaacatacgttggattattatgctggtttatctttcagaacattagttcctaaatacccagctatgtcgccacacatcaaattgtcgacaaacgttcatattacaggtgaaattcgtacattatcagaacaaacgacgcacaatggtccactaatgacacgtattttaaatgatattttggagaaagatgtcatatttaagtcctatgcatcaacaattattgatgaagttgctggtattcatttttataatgagcaagacgaagcagactatcaaactgaacgaagtgaacaattaggtacattatttagaaaaaacatataccaaatgattccacaagaagtcacaccaatgattccttcaagtttagttgcaacctacccatttaacaatgaatcacctatcgtgacattgattaaacgttatcaatcagctgcatcaatgtctaattttgaatcatcggcgaaatcgtggattgaaacttatagtaaagcattgcttggtctcgtaatcccactagttactaaatatggcattgcattagaggctcacttgcaaaatgctattgcaatatttcggaaagatggtctattggacacgatgtatattagagactttgaaggtttaagaattgataaagcacaactaaatgaaatgggatacagtacatctcatttccatgaaaaatcaagaattcttactgattcaaaaacgtctgtgtttaacaaagccttttattctaccgttcaaaaccatttaggcgaattaattcttacaatctctaaagcatcaaaagattcaaacttagaaagacatatgtggtatatcgttcgtgatgtactagataacatctttgatcaacttgtactttcgacacacaaatctaatcaagtaaatgagaatcgcataaatgaaattaaagataccatgttcgcgccatttatagattataagtgtgttacaacaatgcgtcttgaagatgaagcgcatcattatacttatattaaagttaataatcctttgtatcgagaaaataattaaggttatagaattttattagtcgtgagctcaaggattacattaacttattaaatacaatctatacaaatgagagaataatacattttccatattcaaattattaaaaatcacaaaaaagctcggcacttaaatggtgtgccgagcttttttaccgaataacttattgtaaaccttgtctttcttggttattgttttcattatttttttcgtgtttttgtttccactctttttgagtcattacatcgtcaacttgcatgttaacttcaactacatctaaaccagtaatatatttaacttgttctttaactaattcagttactttacggaagattttaggtgctgattcaccatattctaaaattacttttaagtctacagcagcttgtttttcaccaacttcaacagatacaccttgtgtaacgttgttgccacttgagaatgcattagtgaatgtatcagttaagccacctttcatgtctaagatacctttaacttcacgtgcagcgataccagcaattttttcaacaacttcatcagagaaagttaatttgtttttgaattgaggctcttgattttgttcttgttgtttttgacgctcttctctttctttttcgttaacaccagtttgattgtcgtatgcttgttttgctttattgttatctacagtcataatagattctccttttacttgttattttttatatttttttaattaaattctaaattgatgaattaactccatcgatttaaaaaattcataaaatcttgcttacggtctttcatatacccaatacctacaccaattaaacataaaacgatgataagtactgttttccaaaaacctaacgttaagaataatatcgcgattaatagaaacgctaagaaaccaacgattctccatttaaatacttttaaaaaattaatcacttgttgtgtagagtcttgtccgttttggttatgattgttagccatgatatacctcccttacaacactcgtggaccagaagttttctgatctctcacatttacttctaacttacgtactggcatttctgtaaaatgttctacattctttttaatatccgcacgaattgcttcagttaaagattgtacctgaacattatttggtacgaaaaagtcagttttaatgtcgatataagatttattttttttgttatatagtttcgcaactacattcggttgtcttacttgatcatattttgcaaccgtatcgaatgccgtcttttcaacagctttacgagatacgtaaacatgaccatcatcgaagtctttgtataatccaggttttcgatgcgtaggtttgaagatactaaatactaatataagacctattaatatcaatagtgcagcaagtgaaataagtaatggctggaaccattcaaattgaaggaagtagtcttgatattcagttatacgtccatcttggatatacatgaataacaggaaccccacgattactactattaataagccaaggataaagtttttaagtcgtttcacccctaacgacacctccttagttaaagttaatttaaaaacatattaaatatgtacccatcagattttttcttaaacataataaattaataactttaaatttatttttaatatataagatgaagtaccatttagtaatatattccctagtttttgtaaataaaacctctttgttaattaattttcgtcaatatgttttgaagaacgatattctaatacgtctggatcacgatgtttaattaaaaccttattactatttctaggtttttcttcacttaaagattttaaaagtgaccatatcatcgctataatgaccacggaaaatggcaacgctgcgatgattaataaattttgtatcgcttgcgtaccacctgtgtaaatcataattattgcaaataatgccataatgataccccaactcactttaacaaatgacttcggattaatatcaccacttgaactcaacatacctaaaacataagttgccgaatccgctgatgtaacaaagaaaatcataataacaagtaaagtaattaagcttaatacaaaacctagcggataatgttgtagcgttgcaaaagttgccgtttctgtcgcagctttagcaatatcggcaatatgattatcttgtaagtaaattgctgacgcgccgaataccgcaaagaatataaagcaaactaccgccgggacaaaaagtacacctagaataaattctttaatcgtacgtccttttgacacacgtgcaataaatatacctacaaatggtgcccaagatatccaccatgcccagtaaaagattgtccaattttgtaaccattggaatttttgaccgccagacggaatgcgtaaactcatactaaagaaatttgcaatataattacctagaccatttgtaaatgtatttaaaatgtaaagcgttggcccaacaataaaaagaccaataagtactacaaaagcaagtaacatgttgatattactcaacgttttgatacctttatcgatacctgaccatgctgaccaagtaaataatatggttgcaatgacaatcaagattacttgcatcgtgaagttactcggtacattaaataaaaaatgtaaaccttcgtttatttgcaatgcaccgaaacctaatgttgcagcaacgcctgttactgtagctatgactgccaatacatcaatggcaccacctaaagggccacgcattgctttttcacctaataaaggcgtcaatgtagcgctgactaagccaggatatcctttatgaaagctaaaatatgcaaacacaagcgcgacaataccatagactgcccatgcatgaatcccccaatggaaaaatgaaaactgcattgcatcattaatagcagattgcgtgccagctttatgaataggcgttaatttgaaagcgtgactgattggttctgccgttgtccagaacacaagtcctatacccataccagcactaaataacatagcaaaccaagatggcaatgaaaattctgggtcttcaccttcttcacctaatgtaattgatgcgtatcttgaaaataatatatacacacagacaaataaaataactaaaacgagcaataaataataccaagaaaaatgtagcgcaataaatgaagtaatgttttgcgtgagtttttctaactgtttcggaaatattgcaccaaaagcaacaaatatcgtacaaatcactaacgatacccaaaacactagacttactgatttatttttcataaatacaaaccctttctgtgtaatggtaagttcatacccacaactgcaacattttaatcatttgtaattttatatagacacaattaataatacttcatcttttaaaaatgatatataaaatacactcaaattatttatcattgaacaacaaagtattttattgtatttaagtaatgcctttctaatgcattattgaattgatacctgcaaagttgccatatttccctttagaatcaatagtcgctaaacacaaaaaataagtcgccctatacagtattttctgcataaggcgactttacttactaatctatatattaattactaatttcccaatcattgactgtttttccaacaattgatgtgcttgatataagttttcaggtgataaaccttcaaaaacttgtgtcgttgttggttggtaatgtcctgattctatatttttcgtaatatcttctaaatactcatgttgtttaatcatatcaggcgttcgatgaattggacgcgcaaacataaattcatgtgtaaatgttatactttttaattttaatgcatttaaatcttgatcttcattaaaagctacgatagttgtaatatgccctaatggttttatcagttcaatcatagtattgtaatacaagtctgtattataggtgcaaaatatataatctactaatggaatttctttttctttaaattgacgcactaaatcctctttatgattcaatatgatatctgcgcccatcttttcacaccactctgttgtttcttgtcgtgatgctgttgtaatgacagttaaaccataccgtttagcaatttgagtggcaatacttcctacacctccagcaccattaatgattaacacggatttacctatattttcagaaggattatgtgaaattttaaatgtatcaaaaaacgtttcatatgccgtaataccagttagcggtagactaaccgcttcattagcacttatgttgtgtggcgcttttgcaactatagcttctgacaccaattgatatgtcgcatttgatccttgtctatttggtgatccagcataaaatacaacgtcacccggactaaataatgtaacgtctggtccgatagcttcaacagtaccaatagcatcaaacccaagtacacgaggtgcttgagtgacttccatttgtcgttgttttgtatctacaggatttacactaatgctatttactttgactaagatatcatcgttttctggcgttggctttctttgttcgtatactttaaataaatttccttcttccaatttaaagggcttttcaaatcctatcattttcatatcgtttcacctcatttatgaacttatttcttattatacaaaatagaagccatgtgtgcttatatcgcagcatcatgactcctttttcatttgaatacataaataattacagacgactttcgtattacattttagacttatttctaccatgttactgaacaaatttgctttagataagaaagttattaaattttggtcaattaacaaagttgatttgtaaaaacgtatactttattattccgtaactttaataacttgtttaccaaagttatcgcccgtaaataaatttttaaatgcacgtggcgcattttcaaaaccatcttcaatggttacttgtgactgaattttaccttcttgaacccatgttgcgagctgttcactggcttctttaaaagcattagcgaattcacttactaagaagcctctcatcattacttgcttcttaataagcgtaccttgaatacgtggtccgatatctgcttcaggatgattatatgacgaaattgcgccacatactggtacacgtgcaaaacgatttaaatgcttaaatacttcatcgccaactgtaccaccaacattttcaaaataaacatcaataccatctggtactgcttgtgctaacgattctgcaaaatcctctttcttataatcaataccagcgtcaaagcccagtgtctctgttaaataatttacttttttgtcgccacccgcaatacctacaacacggcaacctttaatcttagcaatttgacctacaactgaaccaacagcaccagatgcagctgaaaccacaacagtatcaccggctttaggttgtccaatatcaagcagaccatgatatgccgtttgtcctggcattcctaagacacttaaatataaatcaagtggtacatctgtcgttggaactttagtaatttgattcgcttggacatgattaatgattcgccaaggtaacatacctacaacgacatctccttttttataatctgcgagtgtcgaatcaattacctttgcaacaatatgactgacaatcggcttaccaatttcaaaaggctgtacatacgaatctgccttagtcatacgccctctcatatatggatccactgaaatatacagcgtttgtacaagtacaccatcgctctcaagtttaggcgtgtcaatatcttcaattttgaatgtatcctcttgaggcatgccttctggtattttattaaaaagaatttgtttattttgcatcattaatcacctttctttatttgaaacttttacttatttgttacttaagcgttaagttttaattgtgtcttcgtgatgtctgtatgcaaatacattcttagttgttatattttgacttaagcactgattcatttaacttcaaccacattatatttgctataatcataaatttaaaatgttacgacttgggcacgtatcttccatgctgattgaaaaagaaactctgatgatcacgttaacaagtatctactattttatcgttatagctactttaaaggtgatatcagaactttttgattctagtgactactaatagacattattttttccataagaagtcgatcaactcattagcaacattttcattctcatgaagctgactatgctgtgcagactcaccttcatatttagattctcgataacttttcggactatttcccagtaaatattttaatgatttcgaagaactattagatactctgccgtctgaatgtgtaccatctttcaaatctccataaatatttagcacttcgatacctttacctttataaatatcttttagcacgcgtaattgctgataaggttgattcattcgacttggtttaccatctttatcaactgtaatttcattgacatcttcattcatatttaaaacaccattaaatgtccctgcaatattcacttgtttgtttaactgtggcagcgacttgtcgttaccatatgtcatcatatattgtgcaaatgttaagttccccattgagtgaccgacaaagttgaatttatcgaaattgtattcagattgtaacttagtcagtacatttttaaaccacgcagcattcttatccaaatagccttgtctgttgttttcaagttcaattttcacaataggattcactgcatctttacttagtttccctttaaatgtcactgcaccatcctttgaaacgtaagcagtgatgatatctttagttacccctcttttttctgcttgcttcaccataaatttttcagagttggcactaccaccaaatccatgtaaaaacaatgtcggaattggctttttaacaaattgctgttgttgtattttaaatgtttgtgcctgtcgttgactaaacacaaccgtaataatagtgcctataataatagcgaccgctaacaatgtcgtactaattacaaaaatttttttcacacttttaactcccattcatgtcttttatataagtataaaggatgtgattaaaaatgtcctttagttgattttgaatacatcattaacttttaagatgactttggaaagttgtccgttagcgtttgttaattgattgcttatttaactttcaatggtgtgtcacccattgattaatatataaatatgtatatgcatgtttaatttatctctttttataaataaagacctaccagcactcgactgataggccttttaatatctctaattatttaatttcttttgtttcggctaactctttgtaccaataagcacttttcttaggatagcgttcttgagtctcaaaatcgacatagaataaaccatatcgtttttcataaccatttgaccaagagaacacatccattaatgaccaaataaagtaaccttttacattcgcaccatctttaatagcgtctgcaataacgtttaaatgttgtcttacataatcaatacgtgcatcatcatgaactgttttttcagattcaataaattcatctttatatcctaaaccattttcagtgatataaatcttatgatagttaggataatctttaacaacacgcatgatctgatcatataaaccttgaggatagatcatccagtcccagtctgtgcgaggtacgtcgacatcaaattcacgttgtccgacacctttaagttgatatttagaaccgcctttatcacctgtcgcattatgcgtgatttcagattctccatcgtaacctctcatccaatcactcatgtagtaattaatacctaagaagtcatttaaatctttggctgcatctaaaatggcataatcttcatctgtaatgtttaatttaccgccattaacagataagatatgttgcacaccttccatcgtttcacgagaatacttacctaaatatgttgcatctaagatgaatttattatggatgatatcttctaattctgctgctcgaacatcttcaggatttgatggatcgaacggatattttgttggcaatgcgtgtacaacaccaatttctccttgatagccgccatctttaaataattttactgctcttgcatgagcaaccatcatattatgatgagattggaaaactttttcaaaatcatatttaatacctggagggaatttacctactaaatattggccatcaccaattggtccaatttcattgaatgtagtccaatattttacttctgggaattctttaaaacaatattcagcataatctacaaagtagtcaatcgttttacgatttagaaaatcgccatctttgtgtaacacttctggtgtatcaaaatgatgcaatgttacaaatggttcaacatgacgtttatgacactccgcaaataacttatggtaatactcaacacctttagggttaacttcgccatatccatttgggaagatacgagaccatgcaattgaaatacggataccattaacaccgaatttttcacttaattctaaatccactggatatctgttataaaaatcactcgctggttctgcagtgtaccaatagttttcttctaaatacgtatcccatgctacgcgacctttaccatccgtatttgtcgcaccttctgcttgatatgctgctgttgctccaccaaaaataaaatcttcaggtaatgttttagtcatatgaaaaactcctattcttaattttcaaattgttgttgaacgaaatcaagggctgcttggccatctcgtgtcaatttgatatattcagcaccttgagtcttcgctaatttaatacctaatctatctgtatcttgcttaatatcttcatagttagacgcaacttgtggcgctaaaatgattaattggtactctttcataatgtccatatgtgcgccatatccgccagctgccgctttcactggcacatgatattcttcagctgctttattaagtgcgttggctaataatccacttgtaccaccaccggcacaaagtactaagacatttgtttgttctgtgatatttgaagctttagctgcatcgtctgatacaccacttgccgctaaaattgaatcagcttttttcgtatcaaagtttgctgcaactttttcttttaaatctgaattactttctttacgtccttcttcttcatcaagaatttcactgtcataaacttttaggaatgggtagtaaataataatatctacaacaattaaagtaatcgctagtacgaatgaccataaaccaaatccagtacccatgatgatgccgagtggacctggtgttgtccatggtaagttcacactaaaactgttcattcctaacacttcaacgaaaagtttaaatatccatacgttcacaattggcgctaatacaaatggaataaagaacacaggattcaatactagtggtgccccgaataaaatcggctcgtttacaccaaagaatgttggtacaacagatgcacgtccaatcgctttgtttcgtttagatttcgtcatccacataaacataaatggcacgaccaatgttgcacccgtaccaccaaatgtaacgataaacatttgtgtacctgatgtaataattttatctgcgtgttcaccagcttgaagcaacttgaagttcgcttcgatattcgcatatgtaatggctgcaattgctggttctactattgatggaccatgaattcctacaaaccagaataatgcaaaggcaccaaagataattgtgacacctatccatccatctgctgctgtaaataatggttcgaataattttaaaataccttccgctacatttgatttaaagctgttgcgaatgactaaatctagtgcataaagaatgatgattaccgctgaaaatggaattaagtccttaaatacttgtgaaatattcggcggtacttctttcggcattttaattgtaatattgcgcttcacacagaagttataaacaataacagttacaaatgctgataagaatgctgttaataaacctttagttcccataaacgcacttaagaatccaccatctttggctggatcagaagctaagaacaagaatccacacatcgctgctagcattgtagaaataaagttaatttgatttgtactttctagcttacggttaaatgaatctgttaaagatttcgctgtcgttcctgctactaaaaatgctacgagccccatcgtatagttatatggtttcattaaaatggcttccatgcctttatcccatttaaaaccaaatatatttggcacgtatgcaattaatagaaagatacttgagaataagatgacaggcattgcagaaataaatccatcacggatggctcttaaatatatgttacgtgataatttctcgaaaaatggcttccctttttcaatttgtgcgatcaatttttgcatcattgtcataaccctcttttataaaattctaataaatgcttcattaaatctttcagtaaaattgttgtcattaaatggtcttgaccatgcatcatcgtcacactgtatgcaatatcatcaccttgcgcttctttagctaacaagcttgtttgtgctctatgcgcttcagcaatgcaattgtttccttcttcaatcaatgcatctgcttttgcaaaatctccagcttgagctgctgttaatgcttctaaaaacttagaacgtgcatcccctgcaaatgcaacaatttcaaaacctaataattggacttcttctctattcatagcattaatccccttttaaacttattttctttgtttccaagatgtcgcagtatcttttaatactttatttaagtcatcaatatttttgaaaccagttgtacgtaaccattcacgagcagcatcttcaccttgttcaatgtatacttgaacagcaccagaccatgtagcacggccacaaagtacaccgttgaatttagcaccagcttcgtgagcaaattttaaagtttcttggaataattccgcagaaacaccagcacttaagtaaatgtatggtaaatgagttgatgcatcttgatctttaaagtgttgtgccgcttcctcttttgtataaaccacttcaccttcagcaaagccttctacatacttcatgtttactggtacttcaactttcaatacatcaacgttaaagcgtggttctgagaacaatttcattgcttcgttaacctttctaggcttaacttttgcgaattcaacactaccgttatcaggaatgttgtcatcgtatgttaatacttctaaaaagaatggaatatcttctgcaacacattctgaaccgattctttcaatatatgctttcttttgaatgttaatttcttcagcatcatcaacatcatagtaaagtaagaatttaacagcatttgcaccttgttcttttaaacgttttgcagaccactctactaaacagtcaggtaaacgacctttagcgtttacgtcatatccagttttttcataagcaagtaataatccacaatctttgttacgtgcatcagaagctggtaaaccatattcaggatctaataaaattgaagatgcatattgtgttaattcttccgcaactaatacttttaattgttcaatttgagctacagttggctcttcagtttgatgttttgccatcatgcgctttaaagcaccacgttgatcaaatgctaatgcagaaatgataccttcgttattacttaattgttcaattgatgcgattttttgattcgattttgacattttttacacctctaaaacttcaatttgattgaataaatcatcataattatttaaattgacataacctgtttgtgcttcttgcgcattcagcatgcctaaagtattggctttttttagtaaatcttggtcgttttcatgattaagaattgctgaagtaattccagcaaccgtagaatcacctgaaccaaccggatttaatacgcttattttcggaatattcactctatagaatgtatgattgtgcttagcgaacgcaccttgtgcacctaaagacacaataatccactcaatcccttcgaataagggttgtgacactgcctgtttcaaactttctaaactttcatcaagtggctggttaagcaactgatataattcagaaatgtttggtttaatgactgttggtttatatggattttccaaaactgtttgcaaagttgcacccgagcagtctaatatcacaggcacacctttgttttggcatcgttcaatgatttgtgcataataatcttgatttaatccttttggtaagctacctgaaatagcaactgcttcaactttttctagtaattgctcaaaatgtttaataaatcctgcagcctcttgattatcaatctccggtccctgctctaaaatttctgtttgttgtccttcatgtaaaattgcaatgcagtttcgtgtttcacctttaatgttataaaatgcatgcttgatgtcggcatgatctaattttttagcaataaattgacctaattcaccgccaataaaaccactcgcaaggactggctcacctacttgcgcaagtactcttgttacatttaaacctttaccaccagctgttttacttacttcttgaacacgattaacatcatctaatttcaatgctgttattgggtatgaaatatcaacggatggatttaatgttaaagttaaaatcatatgtgtcgtcccttaatcgtggtattcgcctctgtcccatttttctaagaattcatcaaagaaatgtggatcagcttgatctgcattgcttgtttctaaatgtttaattttagcgattaattttttgttctcttcagttggtttatattcagcgttaataaatgcatcgataatatcgcacattaataactcaccaataatacgtccaccaaagccaatgacgttcgcatttaattcttctttagcatataacgctgatgtcatatcacgtactagtgctgaacgaacaccaggtactttatttacagcattgttaataccaacacctgttccacaaatacaaacacctaagtctgcattcccgctaacaacttgttctccaacttttttaccaaaaattggataatgtgttcttgtgaaatcgtatgttcctacgtcaatgacttcatgtccttttgattttaaaaattcagatacacgcatttttgtatctgtaacaatatggtcgcatcctaatgcaatcttcatagtaatttttcctccttagcacattttattaagcatatctacgcggatttggtgtctaccaccatcgtatttaccttcaacaaaacctttaacgacatttttcgctaacgtgtctccaacaatttcagatcccatagtgatcattcttgaattgttatggcctctagtcatatatccagagcgttcatctgatacttcagcagcaatcatgcctttgatttttgtagcaaccataaagctacctgcaccaaatgcatcgataacaatacctaagttaccttcttgactttgaacatcttttgctacagccaaagttgcatcaacaaagtcaacttcctgtccttctgttacgtcaacaacatcatatttattgtctaataagtatgatttgatgacttcttttaatcgtttgccagcttcatctgaaccaataataatcgccataataagactcctttttactttaattttgaaatacctttcttaaaatatgacatgtttatttgtaggttatgaaaattttgagaaaaggctttcaatttgattacgtttaaattataaacataaacaaacaataaatcaacacaatatgtttacattctgtttgtttatgacatattttcaaacaataagtgaacattcatattgtggtgttgttttaattaggtattcgtctgaaattgtagtaaaactttgtcggggttcccgtttacataaatttgcataaaaaataacccataaatgaatgcaaattcacattcacttatgagcatatagacacatattttaacaatacagttatatttttaatttagtcgactacttcaatatatgttttaatcgtttctactttttcttcatcttcataatccataaccactgcagtcaattcgtttaactgacaaaatgatgtaaaatcttctttgccaactttcgtatgatcaattagcaagtatttttcaattgaattacttagtgccaattgttgcgtataggcttcatctaatgtagatgtcatcacagcacctttatttactgcattactactaaagaacatcttgctaaatcttagtttttccaacatagcattcgccatttcacctacaaacgcttctgtaatatggcgcatttcaccaccaattaaatagacacgaaaatgtgctgtttgtttttctaacaaaattttatacaccggcaaacaattcgttataattgtaagcgtatgatgattgacttcttctgctaatagttcgactgttgttcccggtccgaaaaacaaagtatctccatcttcaattaatgatgcagcttttctagctataaatcgtttttctgcaatttgacgggtatgtttttctttatgcgatatttctttatattgaaaagttgaattactgcgtgcaccaccatgaatcttcgttaaaatccctttattttccaattcaattaaatctcttcgaactgtcatatcagacacatttaaaccttcgacgatttcattcgttcttatcgtgccctttttattcactagtttagcaatttcgtccaaacgttcatgtttattcaatgtaaaattgcctcctttatttaggcgatgggtcattatcctttatgtttagacatccattttaatatacatgcttattctataataaaaattgcgtaaaaactaatataatttaactgttcgattatatgtataattcatttttaaaaagaactgtttaaactgcgcctttgataatcgtaaaatgaatatactataataaaagcaaaagacgttataaatcattcattattttgatggggtgtttaatttggaaaatgatttagagacactaaaacatattatagatagttcgaatcgtattacattttttacaggtgctggtgtatctgtcgcaagtggtgttccagatttccgttcaatgggtggcttatttgatgaaatttcaaaagatgggctttcaccagaatacttgttaagccgtgattatttagaagatgaccctgaaggttttatcaatttctgccataagcgcttactatttgtcgatacgatgcccaatatcgttcatgattggattgcaaaattagaacgtaatcaacaatctttaggtgtcatcacgcaaaatatcgatggtttgcactcagacgctggaagtcaatatgttgatgaattacatggcacgttaaatcgtttttattgtaatgcatgtcataaatcttatacgaagtcagatgtcattgatagaactttgaaacattgtgataattgtggtggtgccattcgaccggacatcgtattatacggtgaaatgttagatcaacctaccatcatacgggcattaaataaaattgaacatgctgacacccttgttgtactaggttcatcactcgttgtacaacctgccgcaggattaatatcaaattttaaaggcgacaatttaattattatcaataaagatcgaacaccttatgatagcgacgctactttggtcatacatgacgacatggtttccgttgtaaaatcattaataacagagtaatcagtacgtaaaaagcagttcccgagtaacagggagatgcttttaattttggagttgcgtttttggaattcggagtttggttttggaattcgacattataatgagtggaaaattttaattattgcgtgcaaaataccttggttttgtagcgattttcatttgatgaattgtgttttatttgaataggatgttacttttaatggtttgtcatttgtaagattaaaaataaacataaaataagtaaagaactaatagctgcgaatattaaaaaactagatatcttcgttatcaaattccgatattaaatcattatatttttcagaatatcttgcataatcttcattattattaaaagctagccatagacctctatcatcatataaatgatatataaagtttttagtattgttaattatatatatttcagaataattatcattctgattgatatttggaactaaccctttaaagtcttgattggatatagcttttagtaattttttatattttatatcttttatggaacacttatatgaaaactcctcgcacaaaatattatcatccttctcctttttatattctttaaagtaatacaattcatctattgttaacgatgtaaatttttttataacatttgttttcttataaggttcactataaacatatactacatgaaccaaatttatagaatcagaaggcgaaaacaaatcttcaaaaatgtttattgcattatcatatacagctaaaaaataagtattattgatagttttaccgtcctccaaaaactggtatttatcgccacttaaacttaaatgaattgcgttttttacctttctaaaattcaacttttttatattcaaattatttatatcaaagcacataatttacaacaccttattcccttaagatttttccttctttagttaaagaagttattcttttcctttgttatttattaacttccaataagaaccaccatgtgattgccctttatttttggaaatagtccatttagtttttggatctctccaggtaggatttttcccttaaaccttttgagtaaatttaccaatactcatccccttatcatttaacaaacttttattaatgtttttggttatattatgagtctttactgcttttagattgtaaaaataatcgtcatgaataatggcattttccgacattcaaattttacaaagtacattgtcatttgcataatgatacctgtaattaatgtaataatagaaaagtgtatatatgtcatatcgccacctgctatacaacttattaaataattaattccaagacatattaattatctaattataaccttagttaagttattgcatagtacaaaaatatataataacttatttgcttgctcctttaactttttaagagtaaaaaataacctgaaacatagactttaacatccaagtttcaggttagtgtaatgtaaattatttacttgttatattatgattaaacatctacttttctgcttgtaagtgctttaatcatctctggatcagcatgtgagaaaaattggctattactttcttctaatgtcgcaatttgttgtttatcttcttctgtaagttcaaaatcaaatatatctaagttttgagccatacgttctggattcactgattttgcgagtacaacgatgtcacgttctactaaccagcgtaaaataacttgtgcaattgatttgttatatttatctgcaatggcctgcaacaattgattttggaataattgatttttaccttctgcaaatggtgcccaagcttctaccacaacattttcttgttgaagtgctgcaacttgttcttcttgttgatggaatggattaatttctatttggttcacttgtggttgaatttgattgtgaatacctaaatctacaattcgatcaacgccgaagttagatacaccgattgctttaattttaccattttcttttaactcttctaatgcacgccatgagccatatacatcattataaggttggtgaataagcactagatcaagatagtccaaatttaatcgttgtaatgatcgttctattgatttgatagtatcttcatagttaacattttcaatccatactttagtcgtaatgaatagttcacttctatcaatacctgaaacttcaataccttgacctacttcagtttcatttaaataactttgtgctgtatcaatatgtctataacccgctttaattgcttctttaaccgcttctgctgtttgttcttgaggaatttgaaatactccgaaacctaatactggtatctttacatctttacttatttcaatatgattcataaaatgaacctcctttatcttgtaagtccactataaaccatggagcaaactctatagcaagccagaggtttactttctctcccaaagacgttcaatattgacatcatgattatcactagcattgattttagcaatatgattatcataattatcaattttatattgtagtaaatctctcgcatcatgaattgtctttaagttttcatttaattcttcgagttgcttatttaaaatttgcttttgctgtgcttgaatattttcatttttaggaagctgcgctaatctacaaaattcgataagcgattcaatactgacgcctgcatttcgcaaatttttcactaaataaatccaatttaaatcactatcattatatattctatatccattttcatctcgattaactggtggaatcacaccaaccttttcataatatcttaaagtgtcttgagatatattcatgagcgctacgacttctttagttttcattgcgactatcctttcagttatatttgggcatctaaagtaatgttgctttatatattgtcatctttgtttgaatacttcttattttattactcaaatttaaatttgtctcttttttaacattttacatttcatcgtttttaattgttttaaaaattgtataacttaaatatttaaaatgatataatcactaagattgataatatttaattttttaaaaattattttcgttgcaatttttgggtgatgcggaaaatttgggtgatcgattgtttatatgcatcaacattctttgtggattgtttgacagtagacagtcatttgcatacgttaacgaattttgaaaaattgaatcattatttaatcataatattcattgcgcacgcgcaacacaaaaaggagacatgtcaatgacatatagaatgaagaaatggcaaaaattatctaccattacgttattaatggctggtgtgattactttgaatggtggtgaattcagaagtgttgataaacatcaaatcgctgtggctgatacgaatgttcaaacgccagattatgaaaagttgaggaacacatggctagatgttaactacggttataataagtatgatgagaataatgacgcaatgaagaagaagtttgaggctacggagaaagaggcagagaaattactcagtagcatgaaaactgaaagtggaaggacttacttgtgggcaggagcggaaaaccttgaaactaattcttctcatatgactcgtacctatcgtaatattgagaaaatcgcagaagcgatgaagcataaaaatactaaattaaaaacagatgaaaacaagacaaaagtaaaagatgcacttgagtggttgcatgaaaatgcctatggaaaagagccagataaaaaagttgctgatctaaaaactaatttctcaaaatcagcacctcaaaagaataccaatttaaattggtgggattatgaaattggaacacctagagcattaacaaataccctaatattactgaatggtgatatttcaagtgatgaaaagaaaaaatacactgcccctattaaaactttcgccccaaaaagtgatgaaatattatcttctgtaggaaaagctgaacctgctaaaggcggaaatttagtagacatttctaaagtaaaacttttagaaagtattatcgaagaagatacaactatgatgaaagaatcaatagttgcatttaataaagtcttcacttacgttcaaagtaatgcaactgataaagaacgtaatggattttataaagatggttcatatatcgaccataaagatgtcccgtacactggtgcttatggcgttgtactcttagaggggatttctcaaatgatgccgatgataaaagaaacaccttttaatgataaaacccaaaataatacaaccttaaaatcatggattgacgacggatttttgccactcatttacaaaggtgaaatgatggatttatcacgtggtagagctatcagtcgcgaaaatgaaacgagtcatacagcatctgcaacagtaatgaaatcattgttgagattgagtgataccatggatgattcaacaaaaacaaagtataagcaaatcatcaaaacttctgttaaatctgattcaagttacaaccaaaatgattatttaaattcatattcagacatagataaaatgaaaaagttaattgatgataaatctattactactaacgatttaacacaacaacttaaaatatataatgacatggatcgtgtcacctatcacaataaagacttagactttgcatttggtttaagtatgacgtcgaaaaacgtcgcacgttacgaaagtatcaacggagagaacttaaaaggttggcacactggtgctggaatgtcttatttatacaatagcgatgtgaaacactaccgtgataacttctgggcgacagctgatatgaaacgtttagcaggtactacaactttagataatgaagaacctaaaagtacggatgttaaaaagtctagtaaaacttttgtaggaggaacaaaattcgatgaccaacatgctagtatcggaatggattttgaaaatcaggacaaaactttaactgccaaaaaatcatatttcatattaaacgataaaattgtcttcttaggaactggcattaaaagtactgattcatcaaagaatccagttacaacgattgaaaatcgcaaagcgaatgggtatacgttatatacagacgataaacaaacaaccgcttccgataatcagggaaccaattcagtctttttagagtcaaccaataaacctaaaaacaacataggctatcattttttaaacaaaccgaaaataactgtaacaaaagaaactcatactggaaattggaaagaaataaataaaagccaaaaggatacacaaaaaactgatgagtattatgaagtaactcaaaagcattctaattctgacaataaatatggatatgtgttgtatccaggcttatctaaagatgtctttaaatccaaagcaagccaagtaactgtcgttaaacaagatgatgacttccacgttgtgaaagataatgaatcggtttgggctggtgttaattacagcgatagcactcaaaattttgaaattaatggtactaaagtcgaagttaaagccaaaggaatgtttattcttaaaaagaaagatgataacacttatgaatgtagcttctataatcccgaatctacaaattccgcttcagatattgaatctaaaatttcaatgactggatactctattacaaacaaaaatacatcgactacaaatgaatccggcgtgcgctttgaactaactaaataagcaagaaaatcttggcactataccatttttatagtgtcgagattttataagtatcgccatcattcaccttgtaatccgcagaccacatcccctttgataagttctagattatttaaaaatcgaattttcaaagacgtacatgcttcaatattcttatcattcattacttgaaaatgtatatgaggttcagtagaattgccagaattcccaaccttcccaatgatgtcaccatatttaacattttgcccctcattcacaatgattgaatattgttgtaaatgagctattaggctatactcattttctgcgtgcttgattacaatataatttcctaaaaactgtgattcatttgtgcttccaatactgttgtcttgaaccccattcactactttttcaactgtaccatttgctggcgcaatgatatcttttccaaaacaaaaataatcagtatttacttttccttggttcttatacgttttatgattttctttaataactaaatcaatagcatacctttgatgtgggtataaataatgataattatataattcattatctccgccccaaaaaaactcatagcaatctgttgtcggcactgcgtattttaaagtcgtttcattcttaatagcatcataattgattaacggacgcataacaaatccaataatactattatctttccaagtcactgccactccaaattgatttgctttatctatccatatttgctccatagtaccatcattttgagtacacacttttaactcatgtacatcagactgccttgtataagatttgaaaagtttcctaaagtgccaataactaaactctcgcttcaaattttgatcaaaaatcttatatattttcctgctcttacttttatttaaataatccccaaagtttgttttattcatatattcttaacctcttatgtttattttggtatcaattctttctccagttcctgcgtcatttttatgctaccttacattttttgattcccctggaaattttgtgaatttgcttttttacatttctcgtcgaatatgttggaatgaatattcacgtttttttcatcatcctattcgctttcagagacacaaaatacctcgcacatcttcgttgcgtgaatcttgtggaagtttttgtctatgaaatcaaaattgctttttattctttattaaagatgtgcataacctttttttattatatgttcttctaaaactttaagtctttttgatagattcacatcattttccaattatctgcaaaagcatttcctctatttttataacatttagttaaccactttgatattttttgaataggaatttaaagacgcattaagacatcagtaacatttatacttgatacaacgagttgtattacttccattttaaagtatattcacatttttctcttagtcatgacggtcagtcctacaatttgaaatttttattgcaacttagtcactgtcaattcgctgtgttcgataatcagtttaccatcaataagtatttcaaactaaaaatttttaaatagaaagaatctagttcctcataatatcctgtcaatacttcattacattatttatctttagtagcttttacagcatatcagctgaaaagttccaacaacattgacaaccaacctaataaataagaaaatataattgtacataacctaaaatgctataaataataaaatgatagtatctatttacttagataaatagatgggcatcgaataaaattttaatgatggagaaaacagggatttatcaacatgacattaaatgagtataattacaacaatgaattaatattaaagttaaacaagattgaagtacaaaaaataacgaaaaaatttctgaggtttttaaggattatgaaatattaaagcccaaaattgtttttaatggctctaatccttatttagcattaaatcatattatagttgctgaaatagaaaattacagttctttagaaacgttctccaatatatatgtagatgaagattactactataattacggagaattaattatcaagtgcaagaaataggaggaaattatgactacttatatgttaatgtattcaataccagaaaaagcaggtggtataacatcagttatgttaaatagatctaaacttttagctgaaaaaggctattcatgcgccttattaactttggatgacaaaaactatgatccattaagagctaagctaacaaattcaggacggttacataaacaagtaaaaattgttaacttatacgaagaattgaagatgctgtatgatgttgaaaatacagaaatcgaaaataaaaatacgcaaacatttgaaaaattaaatcttttaaatcaagaaggcttttatattcaaaaagacgaatatgaagaaaaaaaatatgctagatactttaaagataaccattacataatgtataaaaaatggataaatggtcaattatcacacattgattattttcaaaatcgaaaacgcattaaaagacatgtttttcaaaataaaatacttcgaaaagaaataactttcaacgataaaaataaaatgagtgaagttaaatatttatcaaatgacggcttttgttacttatcatattggtatggggataacgaaaatatagtcaatatattttattttgataaaaacagcaaagaagtattaaactttaaaaataataaagcgttccattcatattggttggataaaaacttaacttcaaacgacgtattaatactagacggtataggtacttatcctaaagtagagaacatgcagaataatgatatcaaaaaaatatttactatacatacgaatcatttcatgtccccttactcctatggcgctgagattaaaccagagttcagaaacatgttactaaaccttaaagagttagatactttagttgtattaactaaagaacaaaaagatgacattataaaacaatttggtgattacaataatataaaggttattcctaatgctatatcttttgaagaaaatttaacacaaaatattcgagaaaaaaattctattattgtattacaaagatttgtagctatgaaaaatatcacacatatcatttccgctataaatattgtaagaaaaaaagtaaaggatgttaagttacacatatacggtaccggtacgcaaaaagaaaattacacaaaacttattaaaaaacttaaattgcaagataatgtgttcatccatgattacgcatttgacatacgtgctctttatacaaaagcctctctaagtgtactgacatcagattatgaaggtctcccaatgagtttactagaggccatgagttacggtgttccagttatttcatatcctattaattatggtcctaaatctataatccaaaataatataaatggaataataacaaaaaagaaggataatattaatgaattggcaaaaaaaataattcatgtattaaaaaaagaaacattgatatctcagttttctgaaaatgccagaacaacaataaagacaaacttttcttacgaagcagtatccaaaaaatggattgaattaatcgatgaaaaaagccaatagcgatcaaagccctctatatcttcaatagtatcaatattaaatgtttatttaatttacaaagtgttcaaatatattgattaaactatgaatcgtctacacttagttagacaaatcaacatacaaataaattttttaaaactaaagtgtagtcgattcaccatattatctaatcattcctcaaattttaaatattaatatttgcacttaaaaagtatacatatcactcaaacaatcaataatcatacttaccttcaacaaattctttaacatgcagtgttatcccttgataatatggatattttgttaatctaaatttctgctttaatgcttcatctctactattcgacatcaaataggcatgttcaagatagcttaaatatgcttcatcattgccgctatctccaaaacctaatattgactttactggtatattgtattttttcatcagaaattgagtagcatataattttccagcatttgacggtgtgaagtcaatatcatacgcattttcaggatcaccagctaatgggttgcttcgactaaatctcgctgtatagttttggtcatttgcgtatctaacaagtgcttctaggatacgcctatcattgctgtgattacctgttgaatgaaaataaaaattataatgtgtttcattaccttcaaatgctctttgtggaataaattcgacattatattgcgcagaaatatgacgtaatatatcttcaatatcttcaaataaaaatggttcgctcaagactttctttttatatgtttctgattcaatatattcgccattattccaagtgaacattttagaactcaaatcagaaaagatatgtaatggtttaaacgtcatattaacttgatccattttatccatgacactttgaaatgtacttcctgtcaacacagcagtcatcacttcattattattagttagtttttccaacaatttttccatttctcttaaatgacttaaatcttcttcatttgtattatgtttaaaatatgtttcatcaaaatcaaacaataataggcgctttgacatactcattcttccataatattttaatgaatttatctataacttaaatacactataagtctcaattaaaagtataagatcgactatatgcttttcatgcttattatatacaactaatgaatccctataaactaaaaacattgcttaccacttttcaaaatacacgagtcatacccctcgttaaaaactattactaaaaatcaaaaatataaaaaaatcaaaaagtatgttttaaactttatgaaacgtgttatataaatagtgtaatataccacaactttaaaaggagattgagatatgaaactaaaatcatttgttactgccactttagcattgggattattatcaacggtcggagctgcattacctagtcacgaagcatctgcagatagtaataacggctataaagaaatgacaatggatggttatcacactgttccttacacgatttcagtagatggtattactgcattacatcgaacttactttgtttttccagaaaataaaaaggtactttatcaagaaattgacagtaaagtaaaaaatgaattagcttctcaacgtggtgttacaacagaaaaaattaataatgcacaaacagcaacttatacacttactttgaatgatggtaataaaaaagtagtgaatctaaagaaaaatgacgacgcgaaaaattcaattgatccaagtacaatcaaacaaatacaaattgtagttaaataataattttaaaatgaaaatagttatacaaggcaaacgctgaaaaattgcgtttgtctttttagtatgaaatgaataatcgaacttgtaatttattattgattgcttctactgacaatagattagattggcctatactaaagtaaattctatattaatgtctaccacaatttattatctaacataacagcaaatctcaaatagctagaacacaaataaatcccctcactaccgttaatagtgaagggatttattttattacttagacgtatgctctattgtaatcatgcttaaccgtattaatcaaccttttatcattgctaaatttccaaatcgaacattatgaagtcaatgcttcaatttttataatccatcattacatttccgcattcattattcagcttctctaatttcgtctgcaatatctttatagtcaatatttgcatttatgaaatcttcatcttgaattggaaaatgctgttcaaatgtttctatattttggatttctactttaacatcttctacttcaaaatctaagacatgtccaccaaagttacgatcatcatttgcaaagtgtacatggaatcctgctgatccgataccatggaataattctggtgtaaagaaaccaacgactgaacctttgacatacgtttcagtttgttcaggttgtcttctagctgagtcaattaaacgtgtataaggcggctcttgtgccggcatcatacgtacatgcatttttttaaacaagcctgaaatttttactgcagaaaataaattttcactcaacatcatttccttaatttctgcaaaaactgcttcagaagatttatctttcgtttcatagcttgtatctgctacgaatttagttacagttgcatatggtgttaactcatcaccttttaattccacaaattctttatgttcatttgcatgataggcttttccatctaaaaagatgacctcaccatttgaacctgttagtgtagcgatacctaaatcaccatgttgcaataattcatttattgatgcagttccttttaataatcctgccattaatgtgcctaatgtaccatgttggtataaaacattagtcataaaatttcccactcctctttaacatttatctttattttagttaaatacgtcaggtaacatatttgttgaaagtttgatattatctttgtaatttacaggtatatcaattaatactggaccatctgtttcatagccctctttaattgccgcttctaattcttcttgattagtaactcgtaaaccttttgcgccaaatgattcagcatattttacgaaatctacaggaccgaagtcgacacctgatgaacgtttatatttcatttcttcttggaattcaaccatgttatattttccatcgttccaaataagttgaataatgtttagatttttacgtacggctgtttctaaatcttgtgatgaaaataaaaagcctccatcgccagcaacggatacaacttgcgtattagggcgtacaagcgcagctgaaattgcccacggtaatgctacaccaagcgtttgcataccgttactaaataataaatgtcttggattgtaacttctgaaattacgtgccatccaaatatagtgacttccaacatcaactgttactgtagtatcatctgttaatactttttgcatagattctataatttcgactggatgtagaataccttcttcatgcgtcgctttgataccagtttcttcatcaatatgtgttcttaattgttctaattcatccaaatgttgttgatttataaatggttcatctactttgtcagaaatcatttcaatcgttttagcaatattaccaatcaactcttttttcggttgcatataattagtaatttcagcttgaacttcgtcaatattgattatttgcgtatctaattctttattccagttactagcctcatattctataggatcataaccgattgtaacaactaaatcacttttacgtaataattcatcaccaacttgattacggaataaacccactcgcccaaagaaatgattttctaattcacgactaatcacacccgcaccttggaatgtttctacaacgggtaaattggtacgctctactagcttgcgaatggcatttgtttcttctgcactagaacttctcattccagctaataaaacaggaaatgatgcatttttaatcgcttcaatgacatcattaatatcatgttcactcggtacccctaaacttggtttttggcaaagtgatatcgctttagattcaactggtgaagaaatcacgtcttgcggaatactaataaaacttgcgccatttttccctgaagtagcaatacgaattgcatttgtcataacttctgataatgattcaggatcttgtacttcttcactgtattttgatgagtattttaatagcgcagcattatcaatactttgatgcgttaatcgtaataaatcattacgtttcacttggccacctaacgctaatacaggatccccttcagatgtagctgttaatagtccggtagttaaattacttacaccagggccacttgtaacaagtactacacccggcttgcctgttaatcttccaataccttgcgccatcattgcggcattttgttcatgacgagtgacaataagttcaggaccatcatcaattaaagcattaaatagatagtctatctttgcacccggaataccaaaaacatattctaccccattattttttaaagtatcaataaccatatcggctgcagtgtactttttatcagtcatttatattcatttcccttcaaatgtgatgtatagatgtgtattacatgtaattacattgtgatttgtaatctaatgatagttacgcaaaattaatgatgtttatcaaaattttacatgtacgattagatttgcaatacataaaaattgccttcagtacattatataacctttgttagatgaataaaaatcgttatttgtaatactaagtattccaaaaatgcatgagtagattttgtgcgttgtgattatgagggatgttggattgatttgtgtggaggattgttagcatatttgaggatgaggtctttagtcaatgacggtttgaaattgtcgttttatggcgggctgaaaatgctgttttatagcaacatgaaattgtcatttcgataaaaaagccacagcaagacttagaactaactgtgacttatacatttcatacttatattagcgattgtttttataattgacggattgtaatattaagtgcaacacctataaaaattcataaaaaatgcccataattggcactttgttgtaagatgttaataaccacaaaaacacatacaaggaagtgccaacatgagctataaccatcttacactaactgaacgcgcacgtatagaggttttacgtcaagaaaattattctttaagatctattgcacgtaaattaaaacgatctgtatctactatctcacgtgaaattagtaggaataatttaaatcagtcgtatcaagctgaaacagctcaaaaaaattatgaaaccaaaagaaaactttgtggtcgtcctactcgatttactccagaacttggtaatatcattaaatattatttaaaatgccactggtctcctgaacaaatcgtaggtcgtctattacaaaatcaaatctgttttaaaaccatctatcgatggattaactctaatatgattaatttcgaacttatttcatgccttcgtcaaaaaggaaaaagacagaaacctaaagaaactagaggtaagtttaatattggccgtcctatttcacaacgtcctaaggaagtaaagaaacgtaatacattcggtcattgggaagctgacacaattgtatccagcagaggcaaaagtaaagggtgcattgctaccttcgcagaaagaaaatcacgttattattattgtgtacttatgcctgatcgttcctctaattctatggagacggcaattaataaccttatcaaacatctacctaaaggtgccgttaaaactattactgtcgatagagggaaagagttctcttgttatcaaaatattgaaaaccaatttaatattaatgtctacttcgctgatccatattccgcatggcaaagaggtacaaatgaaaataccaatggtttactaagagaatttttccctaagaaaacagacttagctaaagtaaatcaagagcaacttaactatgcattagactcaattaattatcgaccaagaaagtgtttaaattggaagtttccttatgaagttttatgtgatgaactgttgcacttaaattgacaaatcaacaattataaatgatagatgcagttccgaaacacattaagaagataatcattaaatatacagaaaagttatcagttttaatataaaacctaaaaagtattaacaccagcatcgcaacaataaaataaacaggaataaaagctttcttccaaaatatagaatctttcaattaagtcactccttattttgataacactcttaaatcatggctcttgagttatcttccgattttcatccgatagccctttcccttgaaccactacgattagaacattatcgtccaccctccgcaagctaaatgacaatttaataatgtacacttttgattgtataagcatgcacaaaatatacgtgtaaatcaataattcatagttgaatttattctattcctgagacattaaataaaggaacgttcatttatactacatacttatcatattccccacacaaacgcaaaaaaacacctcgacataacttcgaggtgttttgtatatatcgtccgacaattaacgttttgagaattgaggtgaacgacgagctgctttaagacctggttttttacgttctttcatacgtgggtcacgagtaagtaatccagcgcgttttaaagaacctctgtattcaggatctgcttctaataatgcacgagcgattccgtgacggatagcttgagcttgtccagtgaaaccaccaccatgaacgttaactaaaacatcatagttacctttagtttcagttacatcaaatggttggtttaagtctaaaattaatgattcgaatggtaagtattcgcgtacgtcacggttattaactgtgatgttaccttcacctggtactaaacgtacacgtgctactgagtttttacgacggcctgtgcctctatattcaacttgtgccaaagtcatttcctccttctaattaaccacgtaattcgtagttttctggttgttgtgcagcgtgtggatgttcagcgccaccatatacaaataatttttaccttgtttttcgcctaaacgagtgcttggtaacatacctttaattgaattctcaattaaacgttctgggttagttcttcttaattcaccagcagtgattgatttgataccacctgggtgatttgagtgacggtagtaaactttgtcagtttctttgttaccagtaaattcgatttttgatgcattaataacgattacataatcaccagtatcaacgtgtggtgtgtaagttactttatttttaccgcgtaagatagatgctacttctgatgataaacgacctaatgtttggccttcagcatcgataacataccatttgcgctcaatgtttgattcatttgccataaatgtttgacgcataataattgtcctcctaaaaaataaatgcttctattcaagctataaacagtttcataacctaatagatgatttcatttgtttcatttttaaaacgtttaatttcatttattttgttaactgttgttcgtttctgcttatatatcttgtaacacaataagtttccggggcttatcgtggggtggatataaaacaataccgttaataatcttataatttcacaagctttttgtcaatggcaatcagtcattttgtaatgattttttacgatgtattttgatatcgttaccaaagtcttttaataactcattttcatctaaataaatcttctctaaatatagtccttcagccggtgcagtgaaaggaacattcttacgattctttgattcaagtagcttcggcacatcagaaatttcatgtcgcccttttccgacttctattaaaaatgcaactaagacacgcaccatgttatataaaaatccagatccagtgacaatataatcaaagccatcatctgtctttacaatttcactttggtataatgttctaaccttgctttctacttcagttttttgcgaacaaaatcccgtaaaatcatgtgtacctatgaattgttgtgccgctctgttcattttatctaaatccaacgtttcaggaataaatgttttcaaaccactttgaaatggatcgcggtgttgtgcttgatatactttgtagcgataacgtttacctacacaatcataacgacaatgaaaatcgtcatcgactgtaactacattattgacataaatatcatcaggtaacgttcggttcattgcatattgccattgtgacataggtatattcagctctgtgtcgaaatgaaagtattgctgtatcgcatgtacacctctatcagtcctacttgaaggatggattctcacatgtcttttatgcatgcgttgtaatagcttttcaaattgttgctgtaccgtacgtccattctgttgaatttgaaagcctagaaaattatttccttgatacgcaatttctactaatatacgcatgaatttacactcctgaatattttaatacgaataaaataattgcaattgggataatcatgattaaagataacgtatctctcaattgccatttaagctgtctgtagctcgttctcttaacattggcatcataacccctaacttccattgcgaccgctaattcttcggcgcgttggaaagctgagatgaatagtggcactagtaatggaataaatgatttaatacgtgttgcaatgttccctgaacttatttcagaaccacgcgacttttgcgccaaaatgattttatctaactcatccattaacgtcgggatgaatcgtaacgcaatggacattatcatacttaattgatgaactggtaatttaaacatctttagtggcgcaagtaatctttcaaacgcatctgttaaatcaattggacttgtagatagtgtcataattgttgcaatcatcacaatcccaattaaacgaagtgatatatatagcccttctaaaataccattagtttcaatcgtgaatccatgccattcaactaatacatatccacctttagttaaaaatatatgcatcattaaggtgaagattaaaaagaaaaatattggtgttaaacctttgattaggaaccataattgaatttttgctaatctcataaagaataagataagtgcaaacacccaaagatatgttaatggtgaatgacagaaaaatattaatataataaaaagaaaaacaaacattaactttgctcttggatcaagatgatgaacaaaagaattaattggtaaatatcgccctataatcaatttatttttcatgttgccactccttatacaagcttacaaatgcttcttcagttaaggcaatatcttttaattttgttagatatttttgttcaaagtcatattgtaactgaacaatttctggcaaaccaatatgccaatccgccaatttttctttatctttgaagagctcttttggtgatgtttgcgacacgatactaccttctttcataacgatgacttcatctgcataacgcgcgacttcattcatatcatgtgaaattaggataattgtcttattttcatctgtttgcagtgactttagtaatcgcattacttgtcgtttactttgtggatcaagtcctgctgtaggttcatcaaccacgataatatcaggattcattgccaatatcgatacaatcgctattttacgcatttgtccacctgacatttgaaatggtgattgtgacattacatctcttgaaaagcctaaatccatcaacagacgatgggcatagtttttggcttcatctacattcattttaaagtttttaggtccaaatatcatttcacgctctactgtgtcctcaaataattgagattcgggaaattgaaataccattccaattctttttcttacaggtctaatatatttatctttggtcttatgtgtaatagtaatatcatcaactgtaactgtcccagtagttggctttaacagtgcattaatattttgtatcaatgtcgatttaccactacccgtttgtccaacgatggcataatatttaccttgttcaaattctgtattaacatcatgaatagcttgatgctggtatggtgtccctttttgataggtataacttacattgtcaaagcgtataatcatagttgatccaccagcccttcataagttaagaatgatgtttggtgtcccagcatttgatttattttgattgggaatggcaaatctagacctattgttgttaactcttctgcatggtcgaaaatttcagtcgctgttccttctttatagacagtccctttattcataacgataacatgatctgcttccatcgcctcagataaatcatgcgtaatagaaatgattgtaatattatgttctgatttaacttttctcactaaatccaataaattttgacgtgcatcaggatctaacatagaagtcgcctcatctaatataatgacagaggggttaagtgctaatacacttgctatagccacacgctgcttctgtccccccgataatgcattaggttcataatctgcacgttctaacatatcaacttgtttaagtgcttcgctgactcttctgtgcatttcgtcatgtggaaccgcatgattttcgagtccaaatgcaacatcgtattttacaattgaaccaacaaattgattatccggattctgaaatacaattcctatgtcttttcttaacttttcaaaattatcatctgttatagtttgattattataaaaaatttctccagatttaacgttctctatgccaatcattaacttggcaattgtagatttcccagaaccgttatgaccgacaatagatgtccactgccctttaggtatattaaaagaaacatctttcaatgtgaaggatgcatcactttgatattgaaatgaaacatttttaaatacaataactgaattcttatcctccacttgtctctctcctttacgattcgtgtatctatcatattttacaatatttataaatcactgtatatgacattgactgggtttgctatatattactagtattttctgactcatttctagtctttaaagagttgtttaacaactaatgataaggacatttattcctctcaaacaattatgtataaatgttaataaaataaatgatttactaatatagggttggccgcgtttgattcaacgataatactttcacttcattcagttctagtgaaattgatcaaactagcttgatcatatttttagattcgcactcaaaaaagtagatataaagaaatcggacttaaaaacatttctgttcataagtccgatatcttattcaataaaaaagcgcgcaccccatcataagtttgttgagttcacgctttaaatctttatttagttgatggggtactctgagctagacaatatttgtatgtggcaaacattatcgttgcactcatttgctttatataaaagtagttagtgtatttatataaattcttatactaattcgataattactgattcagcaccgtcaccgcgacgagggccttgtttaaggatacgagtgtaaccaccttgacgttctgtgtaacgctctgcgatttcaccaaataatttttgaagtgcagtttgtgtagtttcatcttcgtttaagatttcaacattacgtaaagttttagctgcattacgacgagaagctaaatctccttttttacctaaagtgattaatttctcaacaacactgcgaacttcttttgcacgagcttctgtagtttcaatacgttcactaataataagtgatgtagctaagtcacgtaacatagctttacgttgatcagaagtacgacctaattttctgtaacccatgagttaacctcctttatcaatcttcttttcttaatcctaatcctaaatcttctaatttgtatttaacttcttctaaagatttacgacctaaattacgcactttcatcatgtcagcttcagatttgtcagctaactcttgaacagaattgattcctgcgcgttttaagcagttatatgaacgtacagataagtctaattcttcaatagacatttctaatactttttctttttgatcttcttctttttcaatcatgatttcagcgttttgcgcttcatcagtaagaccaacgaagatattcaagtgttcagtcattatttttgctgctaatgaaactgattcttgtggtgtgattgaaccattagtccaaacatccaatgttaatttatcaaaatcactgctttgacctacacgtgtattttcaacagtatagttcacacgttcaacaggtgaatacaatgaatcaacagggattacaccaattggtaaatcactagtattattttgttctgctaatgcgtaacctctacccttgttagcaactagacgaatttttaagtgaccacctttagatactgttgcaattttaagctctgggtttaaaatttcaacatcactgtcatgtgtaatgtcgcttgctgttacttcgccttcatcacgtacatcaatttctaaagttttatcttcttcagagtaaattttcaatgctaattgtttaatgttcataataattgtagaaacatcttcaactacattgtctactgctgagaattcatgtaaaactccctcaatttcaatgtacttaacggctgcacctggtaatgaagatagtaggatacgacgtaaggagtttcctagtgtagtaccgtagccacgttctagtggttcaacaacgaacttaccgaatttagcatcttcactaatttcaattgtctcaattctaggtttttcgatttctatcatttaaatatcctccttatatacgtcgacttaatttaaaatgtttgctcagtgacctgtaacaataccatcataaattatacacgacgacgttttggtggacgacaaccgttatgaggtactggagtaacgtctctgatcgcagttacttctaaacctgcagattgtaatgcacgaatagctgattcacgacctggaccaggtcctttaactgttacttcaactgtttttaaaccatgctccatagctgatttagatgcagtttcagaagccatttgtgctgcaaatggtgttgattttttagatcctttgaatcctaatgcaccagctgatgaccatgataaagcattaccgaactcatcagtgatagttacaatagtgttgttgaatgttgaacggatgtgtgctacaccattttcaatattctttttcactctacgtttacgagatacttgtttacgtgccatttaaaatttgcctcctttacctattattttttcttgttagctaccgttttaactggtcctttacgagtacgcgcgttgtttttcgttttttgaccacgaactggtaaaccacgacggtgacggataccacggtatgatgaaatttccattaaacgtttgatatttaagttagtttcacgacgtaagtcaccttcgactttataaccgtctacaacttcacggatgcgacctaattcgtcatcagttaaatctttcacacgagtatcagctgatacgttagcttcttcaagaattttttgagcagttgacgtaccgataccgtatatataagttaatgagataactacgcgtttttcacgtggaatatctactcctgcaatacgtgccatattaatttacacctctcttttattaaccttgtctttgtttgtgttttggattttcacaaattaccattactttacctttacgtttaatgactttacatttttcgcaaataggttttactgatggtcttactttcatttttatacctccctatattatggagtgacgattatttataacgataagtaattcttccgcgtgttaaatcgtacggagacatctcaacagttactttgtcgccaggtagaatacgaatgtaattcattctgattttaccacttacgtgagctaaaatctcatgaccattttctaattctactttaaacattgcgttcggtaaagtatctaatacagtaccttctaattcaattacatcttgtttagccattgattaacttccccctttttgcaatagtaaggtaatcgtcaatagacaactttattgttacgaatctatcagtgattaattttataagttaaacaaaaattacgggaattaattatcgttaattgccactctcatctatctaatatgattaaatcatgcctcacttaaaatagaccgctaaaagttgatctattacaaatgatctaaaatatcaatgacatctttggtaacgtcgctaatatcttttgaaccatcaatatttttcaatacacctttttgatcatagaaatctaaaataggcttagattgtttaatattaacactcaaacgattagctaccgtttcaggattatcatcttctcgttgatacaatttaccaccatcgatatcacaaataccttcgaccttcggaggattaaatacaagatgatacgttgtaccacatgactcacagattcgacgacctgtaagacggttcattaattcttcttccggaacttcgatattgatgacagcatcaatgtttctgtcaagctcagacataatattatttaatgcctcagcttgctcgattgttcttgggaagccatctaataaaaagcctttttttgcatcgtcttcagaaattctttccttaacgatacctacagtcacttcatcaggaactaattcgccacggtccatataagacttagcttctttacctaattcagtttcttcttttatagcttttctgaacatgtcaccagttgaaatgtggggtattgggaatttcttgacaatttcacttgcttgagttcctttacctgcgccaggtaaacccatcaaaatgatattcataagtgccctcctaaaattatctaccaccaaagcctttatattctttttgagatacttgagcttctaaagatttcattgtttcaatcgctacaccaataacgataagtaaacttgtaccaccaatctgaattgattgtggtaatcccataaacttagttgctaatatcggtagaattgaaataacggctaagaagatagaacctacaaaagttaaacgatataaaactttagtaatatattttttggtttgttcaccaggtctaatacctggaacatagctaccttgtttcttaaggttatcagccattttttccggattaacttgtacaaatgcatagaagtatgtgaatagtatgatcagtacaatatatacaaccataccaacattacttgaaggatttgcagcattcgcaatgttttgtgcccattctttatctggatagaacaacgttaatgttctaggcagtaagaagaacgccattgcaaagattacaggaataacaccagctgagttcacttttagaggtagatacgttgcttgtgaacctaatctttgagcagtttgtttcttagcatattgaattggaattttacgaacggcttcaagaacataaatagcacctacagttaatagtatcagtgacactaatagtcctaatactttcaaccatgctaatgacgtatcttcttgcccaacgaaagcagtttgtccaaattgaattagactggctggtaacgttgataaaatacctgcgaatatgataatagaaataccattaccaacaccgaactgagtgatttgatcaccaagccatattaagaaagcagttcctgctgtcaaaactagtgcaattaataaataactcataattgactgattaataatcagtgcacctttgagataattattaaattggaatgccatacctatagattggataaatgctaaagaaattgctaaataacgagtaacgttatttaactttcttcttcctacttcaccttgttttgcccattctgagaatttagggacaatatccatttgtaatagttgcattacgatagatgcagtgatgtagggtacaatacccattgcaaaaatagaaaatcgtttcaaggctccgccaccaaaagtatttaataactcagtggcaccttgagaaccttggggattatcaaaagctgcaggatttactcctggagctggtatataagtccctattttaaaaattactaacattgctagtgtgaagaaaatcttgttacgaacctcttttgttctaaagaagttcacaagggtttgaatcattagatcacctcgtgtgctccacctttagcatcaatagcttctgctgctgaagctgagaatttatgagctttcactgtcaatttcttatcaagtgaaccattacctagtattttgataccagatttttcattcttaacaacaccagattctactaataaagctggagttacttcagtaccatcttcaaatttattaagttggtctaagttaacaatagcatattctttacgatttatgttagtaaaaccacgttttggtaaacgacggaataatggtaattgaccaccttcaaatcctggtcttacaccaccgcctgaacgagctttttgacctttgtgtccgcgaccacttgttttaccgttacctgtcgcaacaccacgtccaacacgattgcgttctttacgtgaaccttctgccggttttaactcatgtaatttcatttcggcacctccttgattatttttcttctactgttactaagtgcttaactttgttgatttgcccacgaatagcagggttatcttcaacaactactgaactgttagtctttttaagacctaaagcttcaacagttttacgttgtgtttcaggacgaccaataacactacgagtgagggtaatttgtaatttagccataactagttttccctccttaattgtataattcttctactgttttgccacgtaatttcgcaacatcttcagcatttttaaggttttgtaaaccatcgattgtagcacgaaccatgttgattggtgtgtttgatcctaatgatttacttaagatatcagtgatacctgctaattcaagtacggcacgaacaggaccaccagcgataactcctgtaccaggtgcagccggtttcataaatacgcttcctgaaccgtaacggccagtaattgtgtgtggagttgtaccttcaacacgtggaacaactactaaatcttttttagctgcttcaacagcttttttgattgcttctggtacctcttgagctttaccagtaccgaaacctacacgaccatttttgtctccaactacaactaatgcagtgaaacggaaacgacgaccaccttttacaacttttgctacacggttgattgtaacaacgcgttcttcaaattctttcgtctcttcttctctacgagccatgtatttgtccctcctttaaattaaaattctaatccgctttctcttgctgcttcagctaatgctttaacacgtccgtgatataaatatcctccacggtcaaatacgatttctttaatgcctttgtcagcagcttttttagcaattgcttcaccgactttagttgctaattcaactttagttgctgtagtagcaatgtcgctgtcttttgaagaagcttgagctaatgttacgcctttattatcatcaataatttgagcgtagatatgcttgtttgaacgatatacgtttaaacgtggcttttcagctgtacctgataagttagtacgaacacgagcatgtctttttaaacgcactttatttttatcaattttactgatcatttcaatactcctttctttagagtttatctattatttaccagttttaccttctttacggcgaacgtattcaccttggtaacgaatacctttacctttgtaaggctctggaggtcttactgaacggatgttagatgctaatgctccaacttgttcttttgaaataccttcaactttaacgactgtgtttttctcaactgagaaagtaatgttttcttcagctttaatttctactgggtgagaataaccaacgttaaggattaagtctttaccttgcatttgagcacggtaacctacaccaacaagttcaagtacttttacgtatccttgagaaacaccttgtaccatattatttaataaagcacgagttgtaccatggtttgttctatcttctttagaatcagatggtcttacaacttcaattgtgttttcttcttgtttgaatgtcattctttcatttaaagttcttgataattcacctttaggacctttaacagttacatgatttccatcaaaagttactgttacgtcactagggatgtcaataattttcttaccaacacgactcatgttatggcacctccttattttttattaccaaacgtatgcgataatttctccgccaacattacgttttcttgcttctttgtcagtgattacaccttcagaagttgatactaatgcaatacctaaaccatttaatactttaggcatttcgctagcttttgcataaacacgtaaacctggttttgaaatacgttttaatcctgtgataacacgctcatcgttttgaccatattttaagaataaacgaagtacaccttgtttatcatcttctacgtattcaacatttttaatgaaaccttcactctttaagatttcagcaatttcttttttaatatttgatgcaggtaattctaacttctcgtgacgcaccatgtttgcgtttcttacacgagtaagcatatctgcgattggatctgtcattgtcattgattgttgcctcctttcagactcttttttattaccagctagctttacgaacgccagggatttggcctttgtaagctaattcacggaaacaaatacggcataatttaaatttacgatatacagaatgtggacggccacaacgttcacaacgagtgtattcacgaactgcatatttttgttttttttgttgcttagcaaccattgaagttttagccacttaattagcctcctttaaataattatttacggaatggcataccgaagttagctaacaattcacgagcttcttcatcagtgttagcagtcgttacgataacaatatccattcctctaactttacttactttatcatagtcgatttctgggaaaattaattgttctttaacacctaaagtgtagttaccgcgtccgtcaaatgcttttttagaaacaccttggaagtcacgtacacgtggtaatgatactgaaattaatttgtctaagaattcatacattctttcaccgcgaagtgttactttcgcaccgattggcataccttcacgtaaacggaaagtcgcgattgattttttagctttagttactaatggtttttgaccagtgatcaattctaattcttcaacagcattgtctaatactttagaattttgtactgcgtcacctacacccatgttcacaacgattttatctatttttggtacttccattactgaactataattgaattttttcattaagttttcagtaacttcagtgttaaacttttcttttaaacggttcaaagtgggatcctcctttcaacttgttattaattattagatttaatttcttcgccagattttttagcgatacgaacttttttaccatcaacaaatttgtaacctacacgagttggttcgtttgttttagggtccaataattgtacattagaaacatggattgctgcctctgtttctaagattccaccttcaggatttaattgagttggtttttggtgttttttcataatgttaacaccttccacaacgacacggtcttttttaggtagagtagcgattactttaccttctttacctttgtctttacctgcgataactttaacgttgtcaccttttttgatatgcatgtgggcacctccttatttgtattggttgttattaattaaagtacttctggtgctaatgatacgattttcatgaagttaccttcacgtaattcacgagcaacaggtccgaagatacgagtaccacgtgggcctttgtcatcacggatgataacacatgcattttcatcaaatttgatatatgaaccgtcattacgacgaacacctgacttagtacgtacgattacagctttgacaacgtcaccttttttaacaacgccacctggtgttgcatttttaacagtacatacgataacatcgccgatgtttgctgttttacgaccagatccacctaatactttgattgtaagaacttcacgagcaccagagttgtctgctactttcaagcgtgtttcttgttggatcattagttaaacctcccttatctctaaacttgtattaaataattactgactcttcaacaatctctactaaacgaaaacgttttgttgctgataaaggacgagtttcttgaattttaacaatgtctcctaatttagctgaattgttttcatcatgagttttgtattttttagagtatttcactcgtttaccgtataatttgtgtgttttgtaagtttcaacaagtactgtaatagtcttgtccattttgtctgaaacaactttacctacataaactttacgatcgtttctttcgctcacttttgtaacctcctcttacttaattattgattagccttactttgttcaatttctctttcacgagcaacagtttttagacgtgcaatcgtttttcttactgtacgaatacgtgcagtttcttctaattgacctgtagctaactgaaagcgtaggttaaaaagctcttcttttgaagatttgatttgttcttcgatttctgaagtggttaagtctctaatttccttagctttcatttgtttcaccacccaattcctcacgttttacaaacttagtttttactggaagtttgtgacttgctaaacgtagtgcttcacgcgcaacttcttcagaaacgccagcaacttcgaataaaattctacctggtttaacaactgcgatccagccttcaaccgcacctttaccagcacccatacgtacttctaaaggttttttagtatatggtgtatgtgggaagattttaatccaaactttcccgccacgtttcatgtaacgtgtcattgctatacgagcagattcgatttgacgagatgtgatccaagacgttgttgtagcttgtaaaccaaactcaccaaatgttacgtagttaccgcctttagaacgaccagttgttttaggacgatgttgacgacgatattttacacgttttggtagtaacattattattttcctcctccactagtgttcttagtaggaagaacttctccacgatagatccatactttaacgcctaatttaccgtaagtagtgtcagcttcagcgtgtgcataatcgatgtcagcacgtaacgtatgaagtggaacagttccttctgaatattgttcagcacgagcgatatcagctccgcctaaacgaccagatacttgagttttgatacctttagcaccaagtttcatagctctagtgattgcttgtttttgtacacgacggaatgaagcacggttttctaattgacgtgcgatgttttcagctactaaacgagcgtcaagatcaacttttttgatttcaattacgttgatgtgtacttttttatcagttaacgcatttaatttgttgcgtaatttttcgatttctgaaccgcctttaccaattaccataccaggtttaccagtatgaattgcaatgttgatacggtttgcagcacgttcaatctctacgtgagaaactgatgcttcttttaattcattatcaataaatttacggatttttaaatcttcgtgtaaaagtgaagcgaagtctttttcagcataccatttagcttcccaatcacggataataccaacacgaagtccgattggattaattttttgacccacagtattccctccttaaaagttaattaagcttctttagcttcttctttaccgtcacttacgacgattgtaatgtggcttgtacgtttgttaatcgcacttgcacgaccttgcgcacgtggacggaaacgttttaatgttggtccttcgttagcatatgcttctttaactactaattcatctgtgttcatgtcatagttatgttcagcattagctaaagcggacattaatactttttcaattactggtgatgaagctttgtttgttaattttaaaattgcaatagcttcagcagcatttttacctctgattaagtcaagaactagtcttactttacgaggtgcgattcttattgttctagcaaccgcttttgcttccattaggatgtcctcctctacttaatagatattatcttcttgttttcttgtcgtctgcaacgtgtcctttgaatgtacgagtaggagcaaactcacctaatttatgacctaccatatcttcagttacatatacaggtacgtgtttacgtccgtcgtatactgcaaaagtatgtccgatgaaattagggaaaattgtagaacgacgtgaccatgttttgattacttgtttcttttcgcttccttcttgagcttcaacttttttcattaaatgctcatcgacgaaaggtccttttttaatactacgagccatttgggcgcctcccttcttattatgtgcgtgcagctttaagccgcacacccaaataagttgattatattattttttcttacgtccacgaacgataagtttgtctgatgattttttaccacgacgagttttcttaccaagcgtaggtttaccccatggtgacattggagatggtctaccgataggagcacgaccttcaccaccaccgtgtgggtgatcgttagggttcattacagaaccacgaactgttggacggatacctttccatcttgaacgtccggctttaccaacgttaactaattcgtgttgtaggttaccaacttgaccgattgtagcacggcaagtagataagatcatacgaacttcaccagatcttaatctgattaatacgtatttaccttctttaccaagtacttgagcacttgcaccagctgaacgagcgatttgtccacctttaccaggtttaagctcgatgttgtgtactactgtaccaactggaatgttttgtaatggtaatgcgttaccaactttgatgtcagcttcagcaccactttcaacgatttgacctacttctaatcctttaggagcaatgatatatcgtttttcaccgtctgcatatacaactaaagcgatgtttgctgagcggtttggatcatattgaatagaatcaacttttgcattgataccatctttgttacgtttgaaatcgataacacggtattgacgtttgtgtccaccaccatggtgtcttacagtcaatttaccttggttgttacgtcccgcttttttcggtagcggttttaataatgacttttcaggtgtagttttcgtgatttctgcgaaatctaacgaagtcatattacgacgaccatttgttattggcttatactttttaatagccattgtcgcttacctccttaatggtaattggtttattagttaaataagtcgattgatccttctttaagagttacaatcgcttttcttcttttgtttgtatagccttggtaacggcccatacgttttttcttaggtttgtaattcatgatattaacacttgcaacttttacgttgaagatttcttcaactgccattttcacttgtgttttgttaacacgagtatcaacgtcgaaagtgtatttgtcttcagccattgcttcagaagatttctcagtgattacggggcgcttaagaatatctcttgcttccattatccgagcacctcctcaacttttttagcagcagcttcagtaattactaagctgtcagcattagtgatatctaaaacatttaaaccttgagcagttgtcacttgaacgccagggatgttgcgtgctgataattcaacatttacatcttcgttttcagtaactactaatacttttttaggttgttctaatgtagataatacatttttgaattctttagtttttggagcttcgaagttgaatgcgtcaactacagttaagccattctcttgagctttgaaagataatgctgagcgtaaagctaaacgacgcattttcttaggcattttgtatgcataacttcttggagttggtccgaatacgataccaccgccacgccattgtggagcacggattgtaccttgacgagcacgacctgttcctttttgcttccatggtttacgtccgccaccgcttactgctgaacgattcttaacagcatgtgtaccttgacgtaatgaagcacgttgtaaattaatagcttcgaataaaacgctattatttggctcaataccgaatactgcatcgcttaattcgattgaacctgatttagttccgtctaattttaaaacatcataattagccattatgcatttcctcctttcacttcttattatttattaccttttttaattgaagttctgatttctactaaaccttttttaggtccaggtacgttaccttttactaagataactttgttttctgtgtcaacttgaactacttctaagttttgaacagttacagtgtttccacccatacgtcctggcattttttggcctttaaatactctagaagcatctgaagccatacctacagaacctggcgctctgtggaaatgagaaccgtgtgacataggtccacgagattgtccatggcgtttaattgcaccttggaaacctttaccttttgatacgcctgttacgtcaataacgtcgccagctacaaaagtatctactgagacttcttgacctacttcgtaagcatccacgtctacattgcggaattcacgaatgaagcgcttaggtgctgcgtcagcttttttagcgtgaccttcagctggtttattagcatatttattagattttgcatcttttttgtatgcttttttgtcttcaaatccaacttggattgcgttgtatccatcaacttctacagttttcttttgtaatacaacattttctttagcttctactactgttacagggattaattcaccgttttctccgaatacttgtgtcatcccaatttttcttcctaagattcctttggtcatcgaaagtccacctcctaaaattgtctattataatttgatttcgatgtctacaccagatggtaagtttaagcccattaaagcgtcaactgtttttggtgttgggtttacaatatcgattaaacgtttatgtgtacgttgttcgaattgttcacgtgaatctttatacttatgcacggcacggatgattgtgtaaactgatttctcagttggtaacggaattggtccagaaacatctgcaccagaacgtttcgctgtttctacaatcttctctgctgattgatcaatcacgcggtgatcataagcttttaatctgattctgattttttgttttgccataattttccctccttattcgtctacatttagtgatagacttctccacgaaaactatcttacacagcgccatggcaaagcggccgggtgtgtcagtaacctttcgcttcatcgcttttcttaaagtccaacgttagttatattacacgaaaaacatcgataaatcaaggcttttcacataatttttctatctgtctaacacatacttttatattttactttatatacttagtcagttcaactattttcgagatattttttatttccttctttattgtaaattcgtaccttgaatcattttattattatcattgaaaattattctatataatgagtcataagaacggtggtgaatgaatatgaaaaatggaccaaaattatctttagcacttataggtatctttttaatactttgtgagtttttctatggcattccttttttaggtgcaacgtttattttaagttttggatggcagcctttactctttaatgcattactttatctaattcttactattatattattagtgaatagacaaaatgcaattagacctatagcgattattccaatatttggtatagtaggtagttttttagctattatccccttcttaggaattttgattcattggattttatttttcctaatgattctatttgtcctagttgtattatcagcgccaacctatatacctaataaaaatgctcgtgtcatttacacacaatacaaagatggacatagagaataattcttaaaacctttttaattaggtatatataatatagaagaaacacgttcaacaattttaaaagaagtatatttatatcggatatttaaagacattcataacattgctttatgttatttcgcttcttattttgtccttacttcaaagaaaaaaacgactaccaatcattggtagtcgttttttgtgtctggatttaaccatgaacaaatatgaagtacaaaatgaatagtaccattaatacatacattatcggatgtacttctttatgttttttagagataagcattgtaattggatagaaaataaatccacacgcaataccagttgcaattgaatatgataaaggcatcataatgattgtaatgaatgctggcactgcaacttcaaaacttttccagtttatttcagcaaagtttgcagccattaatacacctaccaccactaaagctggtgtcgtaactgcacttgttacaacagcgattaacggactaaagaatagcgctaataggaaacaacaacctgttacgatactagcaaatcctgttctagcacctacagcaacacctgaagttgattcgatataagaagttgttgtagttgtaccaaaaactgatcctacaatcgtagctaaagaatctgagaacaatgctctaccagctcttggtaatttattgtctttcataatacctgcttgagtagcaacggctactaatgtacctgctgtatcaaagaaatcaataaataagaacgttaaaataacaattaagaactgtatcgttaataattgacttgggtctttaaacgcttcaaatgcagcaccgaacgttggttcaatacttggaatcttacctacaataccagatggcatttgaatcaatccagtgaacataccaacgattgctgtgatgatcataccgataaagatagaacctggcaatttaattgcatataaaataactgtaataacgataccgaatatcgctaaaagtactggtggatcagttaaatgtcccaatgttactaatgtagattcatttttaactataatacccgaactttgtaaacctacaaatgtaatgaataaccctatacctgctgaaacagccatcttcatttgataaggaattgcattaataataacttccctaaaccctgtgacggttaatatcgcaaagaatatacctgagaataaaacacctgttaaaccaacttgccaaggaatacccatggttaacacaacagtaaatgcaaagaatgcatttaatcccatacctggtgctaacgcaattggatatttagctattagccccatgaatagcgagcctacaaatgctgctaatgcagtcgctacaaaaatggcaccttggtccattttcatatcttctgatacgcctttaacacctgctaaacttaaaacttgcgggttaactgctaaaatataggccatagataagaaagttgtgataccgcctaatatttctcttttaaagtttgttccatatttatcgaactggaaatagtttttcacgaatggatgctcctttttttaaaataccttaatagtttaatatcattcttaataaaaaacaataccaaaagcgaacttttcgattttctgattcaactttgttcgattttatctataaattcaagttctttaatgcatctttaaacggattattgtctaaaccttcatttttattcatatactttttcatttctttacgagatactttaccagaggatttagacttcatacgctgatccatatgtgcttgcgtttcagaatgtccacaaacacaacgatataccgcttcttttcctttaccaaacaacgttaatttctttttacagtttggacatcttgcatttgttttgcgctgtacattctttttcgtcttacaagatggatcttggcacacaagcatctgaccatttttagttttaactttaatcatgaatttaccacacgttgggcattcagtggttgttaaattatcgtgtttatatttacgatcactatttttaatcccatttacaacatctttcgtaaaatctttcatttcattaatgaatgttttcgcctgatatttaccacgttcaattaaaagtagtttttcttcccattgtgcagttaaaagtggcgacgttaattcttctggtgctaattctaatatttgtttaccttttgacgttactttaattttaccgtctcttgattcaatggcattcatattaaataatttatcgataatgtctgcccttgttgcaactgtgccgataccacctgtttgttttaaagtttgcgcatattttttatccttcaattgaataaagttctgagggttctccatcgcttttaataacgaaccttcattaaaatattctggaggtgttgtttcatgttctctaatgtttgtatttgaaatcttcactttatcgccttctgaaaaaggctgttgcatctctttaatagattcaccttgtctaatagatttaaagcctaatacagttgttacattctctttcaaaacaaatgtgtgccctgcaacctctaaagttacagttatcgcgtcatactcgtgtggaggcattaaagcttctaaaaaacgctcgacaatcatatcgtataactttaattctctattacttaagtctgacatgacaggtctcacttctgtaggaataattgcatggtgatcagatactttttgattattaaatatcgacatttttgatgaaaatgttttagagattaatgggcgtgcttggtctttatatgttgttgccatcgtcgcctgaatacgttctttcatagtatctaccatatcagttgttaaatagtttgaatctgttcttggatacgttacgactttatgtctctcatataaactttgaagtgtattcaatgtttctttaggtccaattttataacgtctatacatatcttgttgtaaatctgttaaattgtacagtgattgcggatacgacttcttatgtttagtagcaacagatttaatcttaccatcgacatttttcaaattattaactatctgttctaaagtttctttattggtatatcgctgatttgattctagctgaaaatcaaacccttttaccgttaatgataatgtatagtattgttgtggtttgaactgattaatctcttgttgtcgtgtatttactaattgaatcgttggtgtctgaacacgtcccagggatagctgtgcatcatactttgttgttagtgcacgcgttgcattaatcccaacaatccaatccgcctcacttctcgctaacgctgcataatacaaatcgttatattggcgaccgtcttttaaatttttaaacccttgttgaatagcttttttagtaactgagctaatccataatcgacggagtggctttttgttaccaactttatccaaaatcaatcttgcaactagttcaccttctcgtccagcatctgttgcaataataatatctttcactttattatctaaaattaacgtttttactgttttaaattgtttgcttgttttaccaataacaaccgttttcatatatttaggtataattggaaggtcttctaatcgccattcctttaaatttttatcgtattgttcaggtgtcgcatttgtcactagatgacctaacgcccacgtgacaatatattggttattttcaaagtaaccattacgcttttgatttatttgtaaagcatcagcaatatctcttgcgactgatggtttttcagctaatattaaagatttcataatttatcctttctcatacgttcttttatttcgaacgcgcttcatctattccactaatctttgatttaaattcaatgattgcaaatgatgtgttaaatgtattgtaacatgttaatatcactattaactttcatttcagttgaaatactatataataaaagtaacaaaaagtacggaggtaatgacatgagcatagttcagttatatgatattacacaaataaaatcgttcattgaacattcgaattatgaatcagcatcatacttatataaacttcctcaacagtacaatgaaatagatgtattaataaccgatgcgattgaatcacctggtgtattttcgattaaagaaaacgattcaatcaaagcaatcatattgtcttttgcatacgataaaaataaattcaaagtcataggtcctttcgtggctgacaattatgtattatctgtcgatacgtttgaaacgctgtttaaagcaatgacttcgagccaacctgacgatgccgtctttaacttttcttttgaagaaggcattcaacaatacaaaccattaatgaaagttattcaagcaagttataacttcactgactattacatagaagcccgtacaagattagaagaagatatgcaccaaccaaatatcattccttataacaaagggttttatcgggctttcagcaaattacacacaactacatttaaatatcaggcccagtcaccacaagatatcattgatagtttagacgaccatcatcatttgtttttatttgttagcgaaggtttacttaaaggttatttataccttgaaattgattcacaacagtcaatcgccgagattaaatacttcagttcacatgtagattaccgtttgaaaggtatcgctttcgagttgcttgcgtatgcattgcaatatgcttttgataactttgatattagaaaagtttattttaaaattcgtaataaaaataataaactcatcgaacgatttaatggtctaggtttccatatcaactatgagtacattaaattcaaattcgaatcacgtaacgtaaaagatcaaacaatccctgaataaaataccaagcaaataccccacagtacatcattagcatgtattgtgggtttttctactttttgtaaatattgaaaattataagtagttgttttttactattagggcagaatgctttacaataacatgcaagtgtcaattaaggggagcacttgcataaatagtataggagagtgagtagtcttgcaatttcttgatttcttaatcgcacttttacctgctttattctggggaagtgtcgttcttattaatgtgttcgtcggcggtggaccttacaaccaaattcgtggtacgacgctaggcgcactcattgttggattaggtttacttattactggtttcgcaaaattcaataatcctactgtaattattgtcggtcttatttctggtgcattatgggcgtttggacaagcgaatcagcttaaatctattagtttaatcggtgtatcaaatactatgccagtttctacaggtatgcaattagttggtacaacattattcagcgttatctttttaggtgaatggtcttcaatgactcaaattatctttggtttaatcgccatgatattattagttactggtgtagcacttacttcacttaaagctaaaaatgaacgtcaatcagataatcctgaatttaaaaaagcaatgggtattttaattgtatctacagttggatatgtaggtttcgttgtacttggtgacatctttggtgttggtggaactgatgcattgttcttccaatctgtcggtatggcaattggtggctttatcctatccatgaatcataaaacatcacttaaatcaacagcactaaatctattgccaggtgtgatttggggaattggtaacttgttcatgttctattctcaaccaaaagttggtgtagctacaagtttctcattatcacagttacttgttatcgtttcaacattaggcggtattttcattttaggagaaagaaaagatcgtcgtcagatgactggtatttgggcaggtattattattatcgtgatagctgctataattctaggtaatttgaaatagaaagttaaatactcatgtaacgtaaaaatgttatcgcttctgaaaataaccattcacttatagaatgattaaaattaattttcgggaattttacgttgaatgttcctctatatgtcccaggaaatacatggctctaaaaacaaaacgcaataacacatcatgacattaatcatgcggtttaagactttaaaattagcgatacttttaaagtcttgatgatattcgtttatcaggtatgcgccatacatatgaagtggatagctgcatagggagtgggacagaaatgatattttcgcaaaatatatttcgtcgtcccaccccaacttgcacattattgtaggctgacttttcgtcagcttctgtgttggggcccacaccccaacttgcattgcctgtagaatttcttttcgaaattctctttgttggggcccctgactagaattgaaaaaagcttgttacaagcgcattttcgttcagtcaactactgccaatataacttcgtagagcatagaatattgatttatgtcccagcctgttgaacaaatatgtcataaataaaagcccccttttcacaatatgcatttacatgttgcggtaaagggggctctcattttctacgaatactaaaatggattttatttccaaatgtgtaaactagacaaacactgcctgatacacgtacaaaataataatactaataatgattgtcaaattggtcgtcatacctataaatggcagtgttcgatatttaaactgaataccataagaaataattgcgacaccaaccgggaacatccaagtgactaacaatgtcgtcttaatcatatcatctgataccggtaacaacacatgtactaacaatcccgcaactaatgctaatccataatgcaaacataaatatttaatagtagcaggtatatactttctttccagagtaaaattcaacatgacacctagcaaaatcattgataacggcatatttgcatgggaaagtatgctaaagaaatcgattgccacatgtggtaaatggatgtgacttatattcaatataaacattacaatgtatgtaacgagtggcactgattgtaataatttcttacctaaatatttaaaatcgaattgatcactaccttcactaaagtagctacctacaaagtaagtaattccaaacatcacaaaggcaccacctatatcagccataccaaaataaataagccccgttttaggccatatcacttcaattagtggatatgcaaacaatccaatattcatagcaccagtcatcatacctactgacccacgcatgtgattatcatattttctaaaaaaccagacagcaatcattttcgccacaataccatatataatcattaaaattggtaaaatggagaatgacaattttaattctgcactgtttaaattcacaataactaaagatgggagtgtgacattaagaactaatgtagcaatgacttgactatctgttgcctttatataattaatgcgcttcaaaaagtaaccaagcgcaattaataaaataatcatagtaaattgttctgtcactgttatcccttctttcaataatcttcataatttataactttaacatactccacagatattttagaagtctactgtttcatgctataatttacattaaatgcacttaattatatttcaaaggagtgttatagtatgtctttagaaaaccaactagccgaacttaaatatgattatgttcgtcttcaaggtgacttagaaaaacgggaatctttgaatttagatacttccgctcttgttcgtcaacttaaagatattgaaaatgaaattagaaacgttcgtgctcaaatgcaagattaataatctatcattcagacaataaatgcttttcattacataaatttgactagcattgctctgaatacgttatattgatgaattgcttcatttttcgctcaattacatctagaatcacaagatgttgtcgtgttatgatttagtgtctcattaacaacatacgcgcatatctatcccaatattgctatttatgttttctacactgctgtactacatgaaccctttgaaacggagaggaagttatcatatgcaattttatctgattttactagcaatactttatctaattgttagttttattagtatttttaaaatggaagttatatttactcgcattttgagaattattatgggtgtgttgttattattcgtcttagcattaacgacgatgagttttccaaaagagaattggtgggtatttatcgtcttattactcttagttggtaatgtcgaagtgacaggatttaaaatgcttaaaaaagatctaaaaggcgtaaacatcttgaatttaatgtcattatttatctttgtcatatatttcatcttaaccatcgtattattctaagtaataaacaaaacatgcaataacataattgtaaccttatattatcatcagattacatatcgaatgccagtattgttttattaacacatcgattaaatcgcacgtgaaataaggtctaaaatttcaaattttaaaaagccataaaagttgtcaatatcatgaccgcttttatggcttttatattatctatcgtttagtgaatcgtttttttaaagtaaagagaatttcatatattactggtacaactacaagtgttaataaagttgatgaaattaaaccaccaataactgtagcagctaatcctttcgaaataagaatcgagctatcttgaccaaataacaaaggaactaatgcaccgattgttgcaatcgccgtcattaatatcggtctaattctagtaccgcctgcttcgattaatgcttctttcatctccatgccctgctgctcattattaatgacacggtctattaacacaatggcatttgttactacaattccaattaacattagcataccaattaaacttggtactgatattgtttctcctgtgattaatagtgcaataatcacaccgataactgtaaatggtaaagagaataaaattgtaaatggtgctaagccacctttaaatgtaataactaggattaaatatacgataatgattgcagctaacattgcaaaggctaattgtgtcattgcattgttaatatcatctgatgcaccaccgatattaacctttacattattcggtttgtccaaattatttattttagacatcacttgtcgtgttgtgccacccacatctttatttgttactttagcagataccgtcgttgcataatcaccttgttcttgcgtcaatttacttggtgtcgttgttttaactaacgtagcgatatctcccaatttaatcgtaccaccagtcggctttttcaaagttatattattcaacttatcttctgaccagtctgtttgcttattttgtttgactttaacatcaacagttttaccattttctttaacagtcgtaactgttttttctggtaagttttcattcaagtgcattgcaagttgacttgcagaaataccattttctgccgctttattttgatcaactttaatttcatactgatcatatgtttgcgataaatcagatttgacattggctagacctttaacctgtttcattttctgttcaatatcttttacagttgattttatggcatccatagatggacctttcacagtaacctctacagatttattacctgcacctgttcctaaatcttgatttttccactctccaggatgtttaaagccatctgcatgtttaataaccttatccgcttctacatcaaaattaggcgtgtcattatcatattcaaccatgattgccatactatttgtactacccgttggatctactggactactaccgccaactgagtattgaattgtttttacatgctttttctgttttaaatatttttcaacatctttcgcatgattcaacactgcttgctccgtttcaccaggcttcggtgtataagtaatagctaaaaatttatcgtcacctgctgaaataaagctagtgcctagtctcggtcctccaaatacaatagttacaaccaaaattaatgtacttaatataattacaatccacttatgatttagtgaccaatgcaatacttttttataagttgtactaacaacacctaatccttcttgatgttgtttattacgacgtttaacgccttttttaaatagtgtagctgccaacgctggaacgagtgtaattgacactaataacgatgctaataaactaaatgcaatagccaatgcaaaaggtctaaacatttcgcctactgaacctgatacaaacacaagtggtaagaagacgataatagtaactagtgtcgatgacattattggtttaaatacttcagttgtcgcactgacaattaaattttcaccttttagttgttcttctgaatctgttaagcgtcgataaatattttcaacaactacaatcgaatcgtctatcacacgtccaatcgctactgttaatgcacctaacgttagtatattcaatgaaacatcactcaatttcagagcaataagcgccataagaagtgataacggaatggatataatagaaattgccgtcgtacgaatgtttcttaaaaacagcaaaataactataattgccacgattgtacctaatgatgctttttcaaccatcgtataaagtgatttctcaacaggctttgcagtatccattgtttttgtgacattaaaatctttattttcatcaacgaatgtatcaattttacgctgtacatctttggctacttgaactgtattggcatcttgagctttagttatttgtagattaaccgcatccttgccattcgttttagaaatagaagtacgcacatcaccaactgtaatatcagctaaatctcctagtttcgctgtcggcataccacttacattatttgatgctgacgcttttgaattttgctgtggtgatgcctgattaacgtctgacatggctgaattttgtttattgtcactttgggattgagattgcccttgtcctcctgccaatgttaatggaatatttatgtttttaaaagcatcaacagattgatactgaccatcaacaacaattgatttatctttattaccaaattggaacaatccaagtggtgttgttcttgttgccgtttttagatagttttctacatcatcagcagtcaatccatatttttcaagttcattttgcttaaatttaagggtgatttcacggttcgtctgcccatttaattgcgcattttgcacaccatctaccgtttgtaattttggtattaattgttcattcagtactttcgttacttttttcaagtcattctctttatttgaaaatgaatatgctaaaaccggaaaagcgtccatcgaattacgtcttaattctggttgaccaacttcatctttaaatttaattttatcgatttcttttttaagctgttcttctgctttatccatatctgtattattttcatattcaactgttacaattgaagcattttgtatggattgcgttttaacatttttcacatatgccaacgatcttacttgattgtcaattttactacttatttcatcttgggtactttgtggcgttgcacccggcattgttgttgtaactgaaataactggattttgtacatttggtagtaattctaatttcaatttggcactcgcgtatacaccgcccaagacaactaaaacaaccattaaaaagatagcaaacttattccccaaagaaaattgtaatagcttttttatcacagtacttccccctctttcactatattcaaaaatattttactcaaccattctatattgtgtaaaaaaatctgaacgcaaatgacagtcttatgagcgttcagatttcagtcgttaatctattttcgttttaatttacgagatattttaattttagcttttgttaaacgcggtttaacttgctcaattaattggtacaatggctgattcaatacataatcaaattcaccaatcttttcacttaagtatgttccccacacttttttaaatgcccataatccataatgttcagagtctttatctggatcattatctgtaccaccgaaatcgtaagttgttgcaccatgttcacgtgcatacttcatcatcgtatactgcatatgatgatttggtaaaaaatctctaaattcattagaagacgcaccatataagtaatatgattttgagccagcaaacattaatagtgcaccagaaagataaataccttcaggatgttccttttctaaagcttctaggtctcgttttaaatcttcatttttagcaattttattttgcgcatcattaatcatattttgcgcttttttagcttgcttttcagatgtttccatcttctgctgccatttagcaatttcggcatgaagttcattcaattcttgatttactttcgctatattttcttttggatccaactttactaaaaatagttcagcatctccatcttcatgcaacgcatcataaatattttcaaagtaactaatatcacgcgttaagaagccatcgcgttccccagtgattttcattaattcagcaaatgtttttaaaccttctctatcagatcgttctactgtcgtacctcgctttaatgccaagcgcacttttgaacgatttcggcgttcgaagctatttaataattcatcatccgttttatcaatcggtgtaatcatagtcatacgtggttggatgtagtcttttgataaaccttctttaaatcctttatgtttaaaaccaagcgctttcaaattttgcaaagcatctgtacctttatcaacttcaacatcaggatcgattttaattgcatacgctttctcagctttagcaatttcttttgcactgtctaacaatgcatttaacgcctctttattactataatcaacaacaaaaccacgtgaaatataacatagcgtataaggtaatttaggtacttttttaaaaagtaactgcgcaacaccctgaatttcaccgtcacgacctacagcgattcttcgcgcgtaccatccagttaatttctttgtttctgcccatttcgttaattgtaataaatctccatttgggtgagatttaacaaatgcgtcatgttcctgattagtgatatgcatcttttccatgatttatgatatctccttctatttaacaatacctttaattatacagtttgtatcttatagtgtcgattcagagcttgtgtatgatttgaactcttatttttgaaatgtccatgctccaatcaatagtttagcaagttcaaatttactcattttaattgtgaatcattttatatctatgcttcctgttaaatttaatgttatcgtacaattaatacttttcaactagttacctatacttcaatatactttcatcatctaacacgatattcatttctaacatgaaccaatttgacttcaatgaataaatttctcctcaagcaaccacattaatgttcatatacaattacccctgttataatgtcaataatctaacaatgaggtgtttgatatgagaacaattattttaagtctatttataattatgaacatcgttgcaatcattatgacattgagtcaacctctcaccgtgaattactttagtttacgggttatacttatctttttcacatttatattatcaatctttttcattttaattaagtcatcacgattaaataatatattaacgattctttccattgcgcttgccgttattcatatgggcattctcgctcatagcacttacgtatatttatactaatggttcaaagcgataaatagcacctctgataaaaattgaatatggtgaagttgcttgtgcgtcttttatgataaccgaatgatattttgaaactttaccatcttcaattctaaaataaatatcatcattttttaaaatcaaatctgtgtaatggtcgttctcttctacaatgtccatatcaaaccatttcaaccaattcgatactgtttgtgatcggtttttacttttcacaataacagtttcaattgaaaattgtttttgaaaatatttttgtaattttttagtacgcatggaatcactttcttcccattgaataaaaaatggtggcttaatttcatcatcatcctgattcattatataaagcaattgccactttatcttaccatctttatgtgtatctctttccatttgaatcggacctactacttcaacctgctcactttgtagtttatttttaactgcctctatatcatttgtacgcaaacaaatatttttaaagccttgctcatacttctcttgaacaatttgagtagcaaaagcgactccaccttctatcgtttttgccatctttttcaacttttcattattttctacatccagtagctcaatataattttcattgatgtaacctaatttattgaatgttccatatttatgatgatacccacctgaatgtaattttataacatctcctggaaaactaaaccgatctaactgatctatataatgaatgatgtgatcaaatttcaatatcattagtatccccctatttacatgtaattacgcttattttaacaaagtataaatatttttgctcttaataattatatattgatttctaattgctcccgttttataattactattgttgtaaaaaggttagctaagctaactattttgtcttaggagatgtcactatgctatcacaagaatttttcaatagttttataacaatatatcgcccgtatttaaaattagccgagccgattttagaaaaacacaatatatattatggccaatggttaatcttgcgcgatatcgctaaacatcagcccactactctcattgaaatttcacatagacgtgcaattgaaaagcctactgcaagaaaaactttaaaagctctaatagaaaatgaccttataacagtagaaaacagtttagaggataaacgacaaaagtttttaactttaacacctaaagggcatgaattatatgagattgtttgtcttgatgtacaaaagctccaacaagcagtagttgccaaaacaaacatttcgcaagatcaaatgcaagaaaccataaatgtgatgaatcaaattcatgaaatattattaaaggaggcacacaatgactaatcaaggctcattaaataaatcacctattttcaccaaaagttttacaattaacttttttgtcaactttatcgtatacctatgcatgtatttgttacttgtagttattgctggctatagtaagcaagctttcgacgcttccgattcattagccggattagttgtaggactatttattgtcgggtctttaattggtcgatttgctacaggtaaatttgtaaatcaaatcggacctaaacgattattatttattggtttaattgctttaattatcacgcaattactttattttattgatggatctttagcttttttaatctttgtacgtctcataaacggtatcgcaactgcagttgtgacaactgcaacaggtactattgcggcatacgttacccctgttaatagaaaaagtgaaggcatcagtttattttccttaagtttagtattaggtacagcgattggcccatttctaggtatgttacttattacaaaatacgcaattgatttactgtttgttatttgtgtcatattaggcatactcggactcattatctcattatttataaaagttgatttcgaagtaacaaatagcaaaactgaaactaatgtcattgataaaccaagatttagtattcatcaatttattgcaaaagaggccattcttgttgctgttattatgcttttaattggcgttacctatgcgtccatcctaacttatttacaagcatttgctttagagcgacacctagtaactgcagcaagctatttctttatttgctatgctatagcatcgttaattactagacctattgctggtagattgatggatgataaaaatgaaaatattattgtctacccagcatttatcatgctttttctttcatttgtgtgcttaatttcaagctatcaaagctggttaatattacttgctggtgcttgcctaggtttagggtatggaaatttatcatctgcaatgcaatctattgcgataaaagtctcacccccgattaaatatggtatcgcgacatctactttttacgttggtctagatgctggtgtcggcttcggtccatcattccttgggctatttactcatatgttttcatatagtgaaatcttcggctttatggccgctttagcaatcattactatgcttgtttacttcttaattcatggacgtcatgtagctagaaatgccatgaactaaatatttatattcaaaaataaaaagcatgccaatctctattcatcatttgtctgtccccaagacgcaattatgatgtactgattggcatgctttttaagtttttagtttgtaacgcttaatacttctatttctttagtaattttatctaacaatttcttttgagaagtactatagaaatagaatacttgtctttcatccgtttcagaacgcaatttagaaataagctcttttttatagattttacggataatcacatcgattttacttgtatcccatagcatttcaaaatgtaatgtatccctcaattctttaccgctaatcttttcagcttcatacactttaaaaagtactacaaattcttcaattgaaatcttatgtgttgtttttaaccagtgctttaactgacttaactccctttctgcttctataaaacgttgaactttattactcataatatgatgcctcctatgtttcttcttagatgtttgtaattcatattattatacaattacttaattttattatatatcaaacttagcattttatctattacaaatattaaattgatggctatatcttgtttagatttatatcttttggacaacttgttgtttattcgacaacatttatacctaaaaaagatatattacaactcaatgacttggaatgtgataacaatgttaaagaaccactaaagatttattatgtagtgattcttaagagtgggatagaaatgatattttcataaaatgtatttcgttgttccccaacttgcattgtctgtagaatttctttttgaaattctctatgttggggtcccgttccccaacttgcacattattgtaagctgacttttcgtcaacttctgtgttggggcctcgccaatttgtaaaaacattaaaaacgatcatttctattaaatttggcatagatatgaccgtttttactttaataaataatattgtattttagggagtaagacagaaatattaaagaatctctaatgatttaatatgtagtggttcctacacattaaccaccaatataattcatgtttatctttttacgttgacgattggcaactgtttgagcagttctctcatctgaatatcgatcatctcttatttgccataaagctttaaattgctcttttaattcttcgtcggtcacgccagaacgaataaacgctttaacgttaaatccatcggcagttgcaaataaacatccgtaaaacttcccatctgatgacagccttgcccgtgtacatgtagaacaaaatgattgtgaaacacttgtaatcaaaccaaattgaacaccattatccttatgtcgataatattttgctacttccccaaaatattttggttctacaggatcaatttcaaagtgctgctctatcatagtaagcatttcatctttagttacaactttgctgaaatcccatccattatcattaccaacatccataaattctataaatcgaatctctatatgtttatctttaaaatattcaagcattggtataatttgatcatcgttaatacctttttgtataacaacatttacttttacattcaaaccaatagacatcgcgtaatcaatttgttctaaaatcgtagtcgctttaatattacgattattgattgattgaaatagcgtatcatcaatagcatccaaactgacattaattctgcgtagcccagcatcatataacttttgtccatgcttttttaataacaaaccatttgtagtcaaaccaatatcttcaataccatcgatttgatttaatttagcaataagtacatctaaatcccgtcgcatcaatggttctccacctgtaatgcgtattttttttacacctaattctgcatataccttagcgattctagccatttcatcaaacgttaacagttcatttttaggtaaaaatacgaaatcatctccaaatacctctttaggcatgcaataatcacacctaaagttacaccgatctgtcacagataaccgtaagtcacggatgggacgtcctagtttatcttttatttgttctaccatttgtggacctcctaacggcttacaatttttgaattaaagcgtccaaatcatgctgataatttatatttttgtaccaatatgagggcgcatctacatccctgacatccaaagaatccgttgataattcatgatatacatttttaaaactgtaattatcagaatgtagtgctttagttatagcgcctaatgcattcggactataaaatgcaattgttggaataaaacgtccatcttctttaaaagctgcgacatctaaatgattttcaataagatgagaaactaaaaactgatacaacgtgcttatagctttaccagtaatcattggtgtatcaacagaaacgacaaaaaacaattcttcttcaggatgttgcttcatgattgtataaattcctgctaatggacctttatcattatgattctcatcatctataacaacatttggatatttaaattgcgttgccaattgcgcattagtactaataataatttcattgaacatatttgttgattctaatgtcttaattactctactataaaaggtctcaccgttcacttccgcaaaagctttgggcttaccaaatcttactgaatgaccacctgcaagaattattgctttcatgctcgcttaacctccactaaccggtggaattaatgcaacggtatcattaggttgaatgaaatcggatttttgtacaaattcctcatttacagcaacttgaaactttttattattgatttgcggataacgttcaaacaataaaatttcaaattgttgtacagtcaatgcttgttcaagcacaatatcttcctgtgctttttgtaatatatctttaatttctgcaaagtaaagtaccttcatctctcttattcctccctcttcgcttcttcataattccctttttgatgcccttgccattttgaaccatcttcccaaatttcttttttccaaatcggaacaatttctttgatacgctcaattgcatattcatttgctcgataggcatctttacgatgcggtgaagaaactgcaattaatacagctatatctgaaatttgtaatggccctattctatgaacaatactcgttatcgttccaggccatttttcatttatttcatctccaatttgtgccaatttcttttcagccattggaatatacgcttcatattctaaatattccgttttgacgcctttagtccattcgcgaacatgaccggtaaaaacaactactgcaccttgatattcatttatagtgaattcacgatattgttctgtttgtatcggttctgtcacgatttcaaattgtttcattcatttcaatcctctatgttaattgtgtatcacaatcatttttaattttatttaataaccattgctcaaatgctgtaaaatcttcatgctccctaacattaatgctataacaaacattcgacaattgttgtaatacttgtaactcttcttcatctcgatagactacgactttttcaaaatcagcatttttaaagccttcaactaatacgatattggtgtcaattgtaacagatttttcaataatttgagtaagattttgattatctacacgtgttacagtttgctgatattgaaaaccttgtacaatactttgatctgcccccgcttcaaaatgcttcatgtgatcgacgtctgaatcctgtaattgaatatcttccttaccatgcccatgatgtttaatagtagctactgtataaccatgtgcctttaagaaagagacaatatgcctcatcaatgttgtcttaccagactttttgtaccctacaatttgtaaaatcataaaagaagttcctcttcagcagcgtcagattcagtcaatataatatctactgtatgacccgctttaaaaccacgtgaccctcctggtaacatgaccatacagttagcatgtgcaatcgctacaaccgcacctgatttattgaatcctgaaggtactacagtagcaccagcacttgttaacgttgctttagcacgtataaatcgtgtgaatggatttgccttggtaaaatcttccattaatgttgctttaattatttgcgggaagacttctagtgcgccacacatatgtttaacagctggtttcacaaatagttcaaatcctgtaaaacaagctgatggatttccagataatccaaacaaatactttccatctgcaaatgcaaccgttgttacgctgccaggacgcattgctactttattaaataacacttccgcctttacagccttataaatttcaggtaaatagtcaaagtctcctacagaaacgccgcccgttgtaataacgatatcgtgtttttccatagcttctttaacgacttgtataccactatctaaatcatcttgttgtgttttgtaaataccaacttcaagacctaatttttctgctaaggcacgaatcattggaccattagagttacgaatttttccatcttctaatacatcattaacatctaataattcgcttcctgttgcaataacagcgacgctcggttgcttaataactttaacctctgcatagccatatgttgcaaggaccgcaatagcccctggattaattacttgtcctttttttagaacaacatcgcctgtcgttgtttcttcaccttttaaagatatattttcattttttgaaaatggtttacgaattgtaaatgtatcttctagttcaatcgtttgttcaaacataacaacagcatctgcgccattaggtatttgtgctccagtcataatacgcaccgcttcgtgatccccaactaatttatcagaaactgaacctgcaccaatatgatcaatcactttaaactcaatgcgattctgaccacttgccccttgtgaatcaacactgcgaattgcaaaaccatcataaggtgatttatcaaaccttggtatatcataagtagctacaatatcttctgctaagatatgatttagacttttttcaagtgctaccgtaattgccggcattgtactctgctgattaacgatacgttgaattgcttctttaactgggattgggtttcttttttctactaccattaaaaatcatctccaaaacttttattttttcatgatatactagatgcactaggaggggtaaaatgactgagtttactcatattaatcaacaaggccacgccaaaatggtcgatgtatcagacaaacaaattacaaaaagaactgctgtcgctcattcaagcattactgtaaatgaaactatttataagcagatttctaataacactaataccaaaggcaatgtattgaacactgctcaaatcgctggtattatggctgccaaaaatacatcaacaattattccgatgtgccatccattaccattgactggcatagatgttcacttcaactgggatgaaacaaatgcacccctttatactttaaacattcaaacaactgtctctacaactggcaaaaccggtgttgaaatggaagctttaaccgctgcatcagtaacggctttaaccatttacgacatgacgaaagcagttgataaaggtatgattattggcgaaacctaccttgaaagcaagtctggcggtaaatctggagattttcaacgccaattagatcaataaattattttgtaagctcatgaatcagatgatttaattctggtttaatgagcttttctaatgctaatttaactgcgcctgttgatcctggaatcgaaaatatcaatttattattaactgtacctgctacagcacgagacaataatgcacgcgtgccaacatcttcaacataactcaaatatctaaataattccccaaagccttctatctctttagttaaaagtggttttactgcttcaatcgtcacatcacgttgtgcaatacccgttccaccagtcgtaatgatgacatcaatatcttcttctaaccacttcttcacctgcgtcgtgatggctactttttcatctttcacaattgtataatgtgcgtcactcacttcaacgtcatctgcttgtaacaattggcgcacgcattgaccacctttatctgtatcaaagtttctagtatctgataccgttagtacggctgctttaactgtacgattcaatttaacgttttgatgttcgcccataatattacactccttttgtcttatcttttttatccaaacaataaattcattagatgtgtggcatctgatgtgcgtgtcatgccatgtattaaaaaccttccacctttaaaagcaacaatgcggtgtcctttaaattcaaacataaccatatacgaattactgcgataatttaattgatgttgttttaaaaattgaacaagaatatcgtgtgtaattgatgtattttcatactgtacagtgtctctcccacacaatgttgcataacgttgttcattcttgtttaaatacggataacttggtacatctccacaagttgtacagtctgaacgttgcattttactgaaaccaaatgaataatgactaccttcccaaatatcgccataagttatttttgtgtcaattggttgttccgttaatactttcatcgcatctcttaattgtaaacttgttgccatcgtcacggcaggttgaatgactcctactgtatcacatgttaaatttaatgctggcaattgtggtaccaaacagttaaagcaaggtgttttaccaggtataaatgcagcttctgtatatgtactctgtacaacacctccataaatccaaggtatacgatgtttatatgcaaaatcattaatcagttgtcgtgtttcaaagttatcggttgcatcaatgataacgtcaacgtcctgtccatgtgtttccaaaaaataataatccacatgggcaatataatcatcaatatcaacatcactacgtaacgctagcaaatgctttttagctgcaaccactttaggcatcattttcaaagcatcttcttcagtatacaatgtttgtctttgtaaattactaaattcaatataatctctgtcaacaatgattagtttagcaatgcctgctctcacaagaccttcagccacatgtgtacccaatgcgcccataccaataatcaacgcgcatttttgatttattttgttttgacctatttcacctatttgtttaaataaaatttgccttgaataacgttcttgactcacattaagttatcctttctatttatccttactttcattatatgacgtgcgtcaatgtctctcaaaaattgcgcctaaaaaagagtttaaaacatcattaaaatgctaatagaagcttgcacttctacatttttaaatacgttctaaactctttcaaggcaaatgtatcattaaccaattgtaataatttcatgagccatttgttctgcttcatagtttgaatgtgtcacaaatatgattggtatttgccattcgttgaaaatacgtttaactaatgtaatactctcatcttttgtagtatcatccaaactagaaaaaggttcatctaataaaattaaatctggtttcgtgctaagtgcacgtgcaagtgctacacgttgtgcctctccacctgacaatgtcataggatattgtttcatcaaatgatcaatatttaaagtttggattaattgatcgatgtgttcagatggttcagccataaaagtaatatttttatagaccgtcatattaggaaacagttggtagtcttgaaataaatatccaatacgtcgttgttgaattttaacattcacgttttttgccgtatcagtaagcaattgcccattcacttcgataatagcttcatctgctttacgtaatccggcaatcatatttaaaacagtagttttaccaatgccagatggaccacgaactgcataaatttttggttcagtatcatctatattgatgcgaattaaagtgttctttaattgatattttaaattgattttaagcatctagtcgacctccttatatttatctttattcaataaattaattgtagatataaccacaatagagaatgcgactagcactaatacccataaccacgcttcattttctctaccttgttccactaagaagtatatttctaaaggtagtgtattcgttttatttggaatatatcctgcaaccattaatgtagcaccaaactcacctaatgcacgagcaaaactcatcattatacctgctaaaatagagcgtttagctaatggtaaaattaatttgaggaaaattttcgtttcacttgctcccatcgttctagctgtattaatcattttcgtgtctatacctctgaagccttgcacagtatgttgatacattagtggaaaactaacaatgacagatgctatcacagcacctgtcaaagtgaacactacaggtaaatgtagtacattcgcaaagaattgaccgattggtcctcttggcgagaagatgattaatagaataaaacctaataccgttggcggcaaaacaataggtaatatcaataaactttccaatactttaacccacgaacctttacgacgatacaaccatttagatataaaaacacctaaaaccgttacaataatcgtactgattacagcaactcgtattgatatccaaaaaggtgttaagtcaggcatggattacaactccttatgctgtaaagtgatattcttttaatatttctttagctttatctgattttaagaattccatccactctttagctaatttactatctgatgtcgcaccagcttcatatgtgattggtttcttaagttctacttctttaattacttttacagtatcaatttttttattttgtttatataagtcagttttatatacaaaaccttgtttcgcattacctttttcaacataatttaatacttgttttacatctttagcataaacgattttactttcaacttctttaaacaagttattgttatctaaatactgtttcgcatattttcccgctggcacagttttcacttcacctaatgctaatttatcattgccttttaagtcttttactgaagtgtaatttgaatctttgtcaccaattaatactagactatttttcgcatatttatatgtatcatgtgctttattcttgtcttttaatgcatctacatctttagtatttgcagacataaatacgtcaacaggtgcgcctgattcaatttgttttcttaatgctcctgatccaccatagttaaatttaatatcagcatttttatgttcttttttaaattctgatgctaatttttttgtaacatctgttaaacttgctgccgctgcaacttgaatttcttgtttttttccattgtctgctgcatcttttttgttgtcttgattatcattagaattagaacaaccagctaatactaaaaataatgccattacaatagctataaaacgtttcattttcattatgaaatacccccaattattaaatatttacactctcattatacacttaacaatatttttgaaaagaagcgttttctctttaaataatgattcaaataattgtcacactttctaaaaattattttttattaattgagctgctagtgtgcctttttctaaatccaatcaaattctaaataattgcctgctattttatttagttaatcaaatttcagttttaagcaaatatgttaaaatattaagcatattgatttaaaataaagttcaagctaattaaaggggttagataatgaacaaagatgtatctttaggtcaaccaattgttagatatgaagatggaaaattattcaatacaacagatcaatatgtgacagaatttccacttacaattatggtgaatggtgaagaatttgcgactgttatatgcagtccaacaaaccttgaggagttagtcattggatttctggcttcggaaggtgccattttaaagcgagatgaattaaaatctgtactgattgatgatagtaaaggatttgcccatgttgaactgaataaagatttaggcgatcgctttcaatattccacaaaacgaatgattgcatcttgttgtggaaagagtcgtgagttttattttcaaaatgatgctgctgttgctaaaacatctatgtctaaaatcactttaacaccacaacaaattattaatatgatgacgcgtttacaaagtgccagtcatatttaccaagaaacaggtggcctgcataatgctgctataagcgatggtttgacattttttgtacatcgacaagacattggcagacataacgctctagataaattatatggattttgtattcagcgacatattactgtccgagataaagtattaattttcagtggacgtatttcatcagaaattttaattaaagccgtgaaaattggtgttggcgtcattttatctaaatctgctccgacaacgcttgctgtaaccttagctaatgacctaaatattacggcagttggatttattcgaaatggtggctttaatatatacagtcatccagaacgtatcattgattctgaacaataacatattcattatagtgtgtcataatgatcaatgcttacatggattaataaccttaaaacaacattgtttaatatacttatcacaacttaaaaagcagtaagtcgatttctactcgaaaccagcttactgctttttatatttttcatttattctaatacaaacctatcatcaatcgttaaatttcaatgttttcttttaatatttgataacaaaacgattgatagacatagccttgttttacatacatatcttttgctgtatcttcaccatctgccaccaatataaccggtttatgatttctagataaagcatattcacctactaatgactgcatggtagaaccgattccttggtgtcgaaattgttctagtacaccaaatccatctaattcaatgtaattttcactttcaatgacatctacaacgccaataggttcattatttaaataagctactaagcgtttaatcacatctttttgataatgttcccttaccattttttcatgtgcatctgcatagtcttttccaaatggcaaactaaactgatatgcaacttttaaataggcatctatatgcgactcgtcaacgatggcaatttcaacgtcagagttacgtggcaaattggcaagcgcatcactttctatggcatacaattccataatgcctagttcaaaattcatatctttaaacatagccatccaatgattatcaagttgttcattttccgggaaactaaacgcataatgatttgaaccttgatttgtatgtaattgatgttgacgttctaagtctttcagccatcgctcttgggtaggcatctttttatataaccatgtattgcttgtatatcgttgtggaaaaataggcgttaaataaatcaactgcttgtcgttattttcaaatattgtaccgtcgcaattaatatctgacatacttatactagccattgacacctactcctttcacttttataaatttcaaagcaacttattcaattactttactatcttaaatatgattattttaatcccataatttgacgaaactgcgagtgattaagtaaagctgtaccaatcaaacttgctacaattgcttttaatatatcaccaggcaaataagctaatgaaattgaaatagctttcgtaaatggtatgttaataatcatgcccataatcaatgtaccaataacatctaatgctataacaccaaaaactaaaataccaacgaataaaatccagaaattaatttcattgatgaatctatcacgaatcgcaccaatcatgaatgctacaactggatataatagtaaaaaccctgctgaaggacctgcgaatacaccaatgccaccgcgaccacctgataacagtggcaaaccagcaactactaataataaaaagacgataacacttaatgtgccatatttacgtcctaaaatcacacctgctaagaaaataccaatgttttgaagtacaattggtactgaagaaaatggtagtggaattaccggtaccaatcctaaaatagcgataatcgctgtcattaaagctgtatatactaactgttttgttgtcattttttacttcctttcgtatttcatgaccattattatagcaccattgtaaactttaaggaacgaaaagtttacaataagttgttctatataaattaaaaccttaattattctacacagctgttaatttacttttttagcaagtgcagttatataatcaaaaaatgcgttgttatctacatgatttatgacattaattttgcgcccatctttacactcaaatgtcttaccttgacttggtccataacttattacatccacttttttctcaattgaatgaactaagtccttgttaccaatataagcagtcgttaaaacatcccataaaaagtaagtagaatttgttataaagtgtgttaatggtggtaccgctgcataacttactcctaaaaaatcaatgcccgtatattggcgttcattcgcccatctttgtctaacatctaacgttagcggtacttgattcgtactttctaaagcaaccatatcaatctctatatcgctatcaaaaacaattttaaccgcttctggatcccaatatgcattccattctgcagaaccatcatgctcaggttcttcaacatttccttttggtaaaaaggtaccacccatccaaactaatttttctatatactgaacgatagatgtatctttttgtagtgcttttgctaaatctgtaagcgggcctgtaaataataatgttactttttctgattgtctctttaaagtttgaataatgtcttcaaaggcttctttgtcgctcacatttgaagcaacgtgtttgactggctcatttaaaattggcaatgcgtccataaaaaaggcatgcatacgccattctttaggaaatggattttttcctcgttcatatgatggcgcaacttgaatatcttcatttgaaaaacgattaataatttttactgatgcgctcaaagatggctctaaataacaatcagcaccaattgtactgacccctatcaattgaacgttttccatttgtaataataaaaatagagatactaaatcatctacaccaccatcatggttaaaataaactttcttagtcactcgaaatcccccttacatttcattttccattaacaatattatgtttttataaaacgttgttatatatctttctacaaaatcataacattctgttgtaatccttttaaacctcttctttaattgatagccattccctgctatccctaccataaagtatgcactaaaataattatgatataacttattaatgcagagatacattgagctattttctcaggcatactactttagctgaaataatactaatctatcattaattaaattgaatgataacaacggcacttattatttaaaaaaatacaaaaatctaaccttcttgctataaaaataagagcctaatacaatatcaaaagattgatatgtttcagactctcatttcactggcttatatagctgaattattttgcagctttaattaatttttcttttaaatctttacgcatgaaatctaatgtataaggatcgttgtaccagtatgtaccagcatcaactttaactatatgtccttctttagtagctttcaaattcttccacatgtttgttgattcatatcctggtgtaggtttaccttcacttgtactcacaatgtaatcaccagcatatttttcaatttcttcttgtttcacttcagcccaacctgcttttgcagttaacttttgttgttctggttgcatttttaaaccaaatgcttgatataatacttctccaccacgaccccagttatcgccgtaagtgtataattttttatcaaattcatcaaacaatgacactgttgcatcttgtccaattgcttttttaatttctttaccgtctttagcagttgtttcttcccaatctttcttccaagcttttactttatcttctttaccaacaattttccctaacatttcttgttgttctaaatatttatgcttattatagtcaacaactactgttggtgctactttttgatactttttaatgtctttgtcagtagagtatacaataattaaatctggcttttctttagcaactttttctacatcgccatcaccaatttttgtaacacctttaaatttatcttttaacactttgctttgatcaacttgttgatttacagctacaatgtttgcacctaattttttaagtccaccagcatatgttggcgcaactactgcaatgcgtttagggtctttcggaatatctaccgttttgccatcgtccattttataagatttagtttcagctttgttatttttttcaccttggttcccacacgcagctaacactaataacataattattaatggtaataatagttttttcataatttcctcctattgaaaatgattatcaatcattccaaaattatacaagattgcatatacatttacaatagctagtgttatttatttttttattttcgcaaaaaatttagcaaaatatcttaatatacctataaattcccacaaaaaaggtaaatccgaacgtcaaatttcatctctttatgccaatcaacgatcgatttacctttttaaatttaaaatgtatctgtaatactcttagcaatatttgtatatgctgcatcttccataggtggattgtgtaatcctgcacgcatgtcacgatagtaacgttgtaatggtcgattcatttctaagcttttagcaccaactattctcatcgccaaatcaatcacttcaagcccttgattcattaccatcactttactcgcacttgtcgaatttcttatctgactatcatctttatattgttgatagccttttgctgtactccataaaaattgtctcgcacataacaacagcgtttccatttttcctaaattttgttgcacagttggcaatgttgcaatcgttccttcaatactattagggctatgttggattgcaaagtctacagcataatttctagcagcttgtgctatacctaaataacagcttggtatatgcaatatccaaccatttggcgctttacttttctctgtttccactaaatgttttaatggtacttttacatcatttaatattaaatcatgactttctgtcgctcgcatacctaatacgtcccaattatcggcaatttcaacaccaggcaaattcctgtccactaagaaaaaaccaacactttttaattcttctatataagcagcaacaataatatgtgttagtgctttactcattgatgtatatgtcttcacaccatttaaaatatacccatcatcagctttaacagcatgtgtacttggtcttccccctcttgttggactacccatttcagcttcactaactgctctattaactaatgcaccattattaatttcaacagcaaattgctccaacatatcttgagaccataatttctgttcataaatttgtcctacgacactcacatgccaaccaatagataatgctgtggcaccatcaagttcgcctaaaaatgattgcaaaataaccatgtcttctatggtcgcaccttcaccaccatattcttttggtaacgttaattttccataaccttctttaattaaccattcaatatttttatatggaaattggctatgttgatcattatattcagccttagccttaaatgtatctccaattactttgaatttttcaatccattttctttgaatttccgttgttattaaaaaggaattatccatatcattcatattagccaccccacacaacacacaatataaattatttattcctagtttaacactcgactttaaaaataaaaaggaacgtgctgtgaacaattaaaagaaagctgataattcgattaagtatgcacttaattttctccataaaaatacaccttaaactatacaattcgctgtatggtttaaggtgatattcaaacaatactaggtttgatttaactatcaagcatctactttgtcatttttaataccagcaaataataaaatccatgtcacaataataaatggcaatgttaatgcaggtaagccaaacggttcaagcaatgttgttgtacctagttgcaccactacagttaataacacacctaaaaaagtcgaaatataagggttaatcgctgttttaaatgtatatcctagtgcgattgccattaatacaaagttataaccgaacaacccctgattaatatcatcataattaccacctaatagagctacaatgataaagcttaacaaactagctataacagctaagagtgctgcttttcttgatgctatcaatatgccgattaaaatacatacgccaccaattacactcgcttcgataaatacttgactgaatccctcaaataatgactgaatgacatgtattcgatcattgttgctaaaattaaccgtttcaatgttttgaggcattaactttaacgatgtatctacaaatttaacctgtcctgaaagtaaaattgtaaaccaagtcacaatgacaaaaggcatcgtcagcatcggaactttatatggtcttaaaacttctctcactgcagcagcgactggtaacgttaataaagttgctatcattgttataacaatatctaatcctgacttatctaaaaagattgttaacgcaatggcagttaacactggattaaatccggctaacccatcattaatctctgcttcactataattaatgtaacgtgcaaatgcataagctatgatactacctatcatagctgctaatccaactgtccagttggccacgaataatccaatcaagataaataaaccagtccacttattactaattaacactacttgagatatatttttcaaaagcacatctatcattttcaaaatgcccaccctttttcttgaatgtttactcattaatatactactattttacaaaaagttatattaaaaactctatttcctaaaccctaaatatcttttactatttgttttaatcgtaatcatatatttttaaatacgaaatagtaaatttattttttactgttccgcattaaactttgtatattacttgtttatcacaacaattaggattaatataaattttgtaaattgtatctaatatgaaattgggggttttaatttgcattttacacaacgagagcaagacaaattaatgattgtagtggcggcggaagttgcacgtcgtcgtaaagcacgtggtttgaaactaaatcatcctgaggcattagctttaatcagcgatgaattattagaaggtgcacgcgatggtaagaccgttgcagagttaatgagttatggtagacaaattctaaacaaagaagatgtcatggatggtgtcgaacacatgattacagatatcgaaatcgaggctacgttccccgatggtactaagttaatcacagtacatcaccctattgtttaaaggaggcagtcaaatgataccaggagaaattattacaaaaagtacagaggttgaaattaataaccatcatcctgaaacagttatcgaagttgaaaatacaggagatcgaccaattcaagtgggctcacattttcatttttatgaagctaatgcagcattagatttcgaacgtgaactggcatatggaaaacatttagatattccagctggagcagctgttcgatttgaacctggagataaaaaagaagttcaattagttgaatatgctggcaaacgtaaaatttttggttttcgtggtatggtcaatggtcctatcgatgagtcacgtgtctatcgcccaactgatgaaaatgatgaatatgcaggtgtattcggagataacggtgatgaaaacgtgaataaaaaaggaggaaaaagatcatgagctttaaaatgacgcaaaatcaatatacgagcttatacggtcctactgttggagattctattcgtttaggtgatacgaatctatttgctcaaatagaaaaagactacgcggtttatggtgaagaagctacttttggtggtggtaaatctattagagacggtatggcgcaaaatcctcgtgtaacacgtgatgacgtgaacgttgcagaccttgtcatttctaatgccgttattatcgattacgataaagtggttaaagctgatataggcattaaaaatggttatattttcgccataggtaatgccggcaacccagatataatggataatgtcgacattattataggttcaacaacagatatcattgccgctgaaggtaaaatcgtcactgctggtggtatcgatactcatgttcattttattaatcctgaacaagcagaggtcgcattagaaagtggtattacgactcatattggtggtggtactggtgcttcagaaggttctaaagcaactactgtaactccaggtccatggcatattcatagaatgttagaagctgccgaaggtttaccgattaatgtcggttttacaggtaaaggacaagcaacaaatccaactgcactcattgaacaaatcaatgccggagcaattggattaaaagtacatgaagactggggtgcaacaccatctgctttgagtcatgcattagatgtcgctgatgaatttgatgttcaaattgcattacatgcagatactttaaatgaagcaggatttatggaagacacaatggctgctgttaaagaccgtgtacttcatatgtaccatactgaaggtgctggtggcggtcatgcgcctgatttaattaaatccgctgcattttcaaatattttaccttcatctacaaatccaactttgccttatacacataatactgtagatgaacatttagatatggtaatgattactcaccatttaaatgcggctattcctgaagatatcgcattcgcagattcacgtattcgtaaagaaacgattgcagcagaagatgttctgcaagatatgggtgtattcagtatgattagttccgattcacaggcaatgggccgtgtaggtgaagtaattacacgaacatggcaagtagcacatcgcatgaaagaacaacgtggtcctttagatggagattatgaacataatgataataatcgtatcaaacgttatatcgctaaatatacaattaacccagcaattacacatggtatatctgaatatgtaggatctatcgagccgggcaaactagctgacattgtcttatgggatccaattttctttggtgttaaacctgaattagttgtaaagggcggactaattaactctgccgtaaatggcgatgcaaatggttctatacctacatctgaaccgatgaagtaccgtaaaatgtatggtcaatacggcggaaaccttacaagtacgtcaatgacattcgtgtctaaaactgcttatgaaaatggtatcaatcgtgcattaaatttaaaacgcatggtgcgtccagttaaaaatattagacaattatctaaagcagatatgaaaaataacagtgcaacacctaaattagacgttgatccacaaacatatgaagtatatgtagatggagaaaaaattacaagtaatgcagcaactgagttaccattaactcaaagatacttcttattctaggaggaacatagaatgattgttgaagaaatccaaggcaatattgccaatttgtcaaattcagaaaaacaaaagcacgtcgaaaaagtttaccttgaaaattcagatctcgttaaacgtattcaaagagtcgtaacagatcatggcactgaaattggcattcgtttaaaacaacctattgacttacaatatggagatattttatacgcagatgaccataatatgattattgtggatgttaattcagaagatcttttagtgattcaaccaagaacattgcaagaaatgggagatatagcccatcaattaggaaatcgtcatttgccagcacaatttacagagactgaaatgctagtacaatatgattatttagttgaagatttattaaaaagtttaggcatcccatatgttagagaagaccgtaaagttaataaggctttcagacatataggacattctcatgattgatcatacacacttaagattatttcagttctgtgattcacagtttccaacaggtgctttcagtcattcatttggtcttgaaacatatattcaacgaaatataattcatgatgatcatacttttattgcttggttaaaaatgtttttacaagagcaacttacctattctgatggtttagccatgcgtttagtttatgatgcattggaaaatgatgatacacaaaaagtattacacatagataagctaatgtttgttcaaaacttacctaaagaaacacgtgttggtgcaaaacaaatggggactcgcatggttaaattggctttagaactttataatagcccatggattgcttggtatcatcaacaaatgcaagataagaaagcaaagttaaatccagctatttgttttactatgctaggccattatttaggtgtagatattgaaacgattattgattactatttatatcaaaatgtttcaagtttaactcaaaatgctgttcgtgctattccacttggacaaactgctggtcaaaagatagttactcacatgattccttatatagaagaaacaagaaagcagattttcgaattaaaagaagcagattttggcatgacagcgcctggtttagaactaaatcaaatggcgcatgagaacgtcaatgttagaattttcatatcataggaggttataattgtggcaaatccgattaaaattggtattggtggtcctgtaggtgcaggcaaaacacaattaattgaaaaagttgtaaaacgtctttcaaaagaaatgagtatcggcgttattacaaatgatatatatacaaaagaagacgaaaagatattagtaaattcaggagttctacctgaaagtcgtatcattggtgttgaaactggtggatgtcctcatactgcgattcgtgaagatgcatctatgaactttgcagcaatagacgaattattagaacgtcatgacgatatagaactaattttcatagaatctggtggcgataacttagcagcaacatttagtccagaacttgttgacttttcaatttatattatcgatgttgctcaaggtgaaaagattccacgtaaaggtggtcaaggtatgattaagtcagatttctttgtaattaacaaaactgatttagctccctatgttggtgcatcattagaacaaatggctgaagatactaaagtatttcgtggtaaacatccatttacttttactaacttaaaaaccgacgaaggtttggatgaagttattgattggattgaacgcgacactttactcaaaggattatcataatggatgaacaacaatggactgggcaacttgatttaacagtgttttttgatggcaatcgatcagtatcaagagatattttctttgaaaaagcacttaaagtgatacgtccagtttatctaaatcaatctactattcctacattttatatagtaaatgtaggtggtggctatttagatggagatcgttaccgtatgaatgtgaatgtcgaagataatgctaaagtgacattgacatctcaaggtgcaacaaaaatatacaagacaccttccaatcatgttgagcagtatcaaacttttaatttgaaagataacgcatatttagaatatgtcgctgatccaatcattgcatatgaaaatgctaaattttatcaacacaatacgttcaatctcaataattctagttcattattttatactgatattttaactcctggttattcaaaaactggcgaagccttcaagtatcaatatatgcatttaataaatgaaatttatattgaagatgagttagtcacatatgataatttattattgaaccctaataaacaatcgatcaaagaaataggttatatggaacattactctcattatggctctgcttacttcatacatgaagatgttaaccaaaaactaatcgattcagtttatgaaaccattagttcttatagcaatacattcgattgtcgtgttgctatttctcaattgcctacacatggttttgcagttagaatttttgcttatcgcacacaaattatagagaaaatacttggaaccatccaaagctatatcgcagaaaatatttatgatcgtaaacttgattttctaagaaaatattaaaataaaaagactagtgtaccttgtttcaagcttaataagctgaaataaggtatggctagtctttaactttaattaaagcatcttcaatatttaaattttaagttaattttatgtcccaatgctgaataaataacttcgttttaataaattgttatcgttcaatgttattaaacgcaattaaccttgatttaatttttaatgtattcttctaattctgaaatcagtttttgaatatttgctttttgtgtatctgtaacataaacaataactgttctttcgtcttgtaaacttcttttctttgataacaattttaaatcttttagcttttgtaaagctttagttaaatagtaaggtttgaactctgagcacttagcaatctctttagatgagatttcgttagactcacttcttaaaatatgatttaaaatataaatttcttcatagttcaaattgaacttcttttttgtatctctgaaaaacttcttaacttgaaatgttgcgttgactaaatcattaatgtcattaattttactcattattaaaccactcctctgatgcacatcttgttgtagcaaggttcacatgtaatttattaaatcgaaactctatccaactatgttataaagttcattctaaacaaataagtataaaaattcaatatttttattactagaatatggttaaatacatttatttcttataataatttgatgtttaagatattttgccaaattgaaaattattagtctgaatattttgtatcttaactgatatgtaaacttttaaaattttaatctatatcaacgtgtttgatttgatattttttatattaatttgatggcttgctcacaaaatttataaaatataaaaaaagaagagctttaaatcataacgcatgccatttatctttaaatgcaatgagttatcattcaaactcttcttatcaacctacatacattgacattatactatcatatgttgttttacgtattcaacaaacatttcaacgttatcacttttaatatcatgcattgggacattaccaatattaaatttgaacattatagtttgaccatcataatctatcttctctatttcattataactaatacttctataataaaattgaccattcatatctacattcataattaatctttcatttgttgctataaatgccccttcaaattcattcttaccttgaacttgatactcaattattcctagcactgacgggccctttttttcagttggaaataaatcatttggatttacattatctaaaatcataatatccctcccacttaaaactataaactattcttcataggtatatgaaatacaaaagattaactatttattattaagcttaacttgtattcccttttcaagataattataacatgcttgaataagcatagtgactttagaaaacttttctcgcttgattgttacaataacacgcctttcatctaattcacatctctcttttttaactaatcctttcaaaattaaacactttaaaatcggactaaccgcaaatatcgggtgatggaattcaccctgtaattctttaaccgtcaattgacctttatgcagatttaatattcctaaaacgtataactcttctaatgataattgacacatatttaaataacactttagatttagcaataattcttgtgacgacaataaatacgatacatagtcacaactaaaatcaaatgtatattgaccaaaataacgttcaatatagtcactaagctcattattcatatattctattttatctatatgcattttattaatcgaaatagtcaatttacgttgatccctttgatctcttgctttcaatagccattgatgattgtttaaataacttaacatttgaagaagtgccatcttagattggatttctttcatttttaataacctatctattgaagcgctattggaatcagaattatcatatttaactaatagatttaatagtttcacttgagtcaaagtgagatgaaatgaatatttcaacatatcattaatgactttcaacattagtatgtgtgcagttaaacgcttaactttaaatttagacatctttaaaacctctcttaaaccatgcctatatctcaagatgatatttcaaatgaacaatactattgcttgagaccattaatgaatgatcataaatatttctttctataaaattagctttccaataactgtgttgttgcataatatcattcacaagtacaccattttcggaagtatgattatctttatctatacttaaaacaatttgtttagttttagcatggctaaattgttgaagacccttacacgataaacgtatagcgtctgaattctcatttaacaatgcggctggcaaacaaatgacacattgtacttcatgtttgaacttcgttacaatcatcgtgtcattttgataaataacaatccctcgtaattgattaagtatatttatgataaaaatgaatattgataatctagtcaaatttatttctttgctcgcttcacttataattgacatgtgcataataagtcctcgaaattttgtataatttgtcaaaagttcagtaaccttattaatatcagacattgtgattttttcttttaagtcattattctcattaatcaaatctacatcacatataattttagaacgtgcaatagacacctgttctatttgtcttagcggtaagataaaatagtctattagatgatcaatttctttatcatagcgcgtattcaactcatttggttccagatgatatattaattcaaatactcctatataattatctattaaacgtttcagtttttgaattgcagtagtatttaagtcgttaattaaaaatgcaatcttacatctattactctcaaaagtcatattaaaaattgtagctactagcttttctatcttgcctctttcagtactcgttaacaattccttatattcatgtttaatacgaaatactacatttacattgtaattcactatcttttgaagtaataaagtgatttgttcaatcgatagctcattgcttgtatcgattgtaacaattatatgcaagttttcaggattaacacctaatctttgaatgatttgtttaatagtatagtaatccatccaataaaaattacttcctttaatatagatgtttttaggttgatacatttgactcctttttgtaggctcaaaaggtatatcaatctcgcgcatacttgaagaactttgattagtatcatcaaataattcaattatatttttatcaatttcaactaattgggaatggttaattgaatgagatgttggactatttctttttctaattaatttaggagtgtcaccatacgtttctttaaagaggtgtataaaacgagaataatgattaaaaccatgactacttgcgatttcttcaatgggcttcttagaagttaaaatatcaattaagcaatgctccagtctaatatgatttaaatattgaataaaattactataaggtgtcgctttaaacatgtcacttaaagctttgtttgtgatactaacttgattaatgacatctttcctatttatctttttatggtggttgtttgttaaataatcgtgcacttcttcggctactaaatgacgactaccatcgtatgtatttaatgacattaattcaacacacatataattaataatcttatcattagcattataaggctgttgtttaattttgctgtagattaaatacttaatcaagattctaagagtgctagcaacctcatttgttaatatcttgccacgcatcatatagtttgcattcataaacttcaaaaatgtctttgcacttacttcaacaacacaacatacactatcatcatgaccatcaatctgatacaaatcattcaacataataacggtgacatcatttcttttcacatcatattgttgtagattgattgaaactacacctgtaccttgaagccaatatataatttttaagtttgcttccttcacactactcattttcatacttttaaaaatatgtagtgaataattatctgtcatcttacatcctcacatatacaaatatattgatttactcctgtttgtctttctcaaatcaattgtcaacatctaatattcactaccaattatatcgccacatgttttttagcagtaacaaaacataaatcgattatatcaaataacacttttattaaaacatttttttatgctaaattaggatattttatccattaaatatacatttttatccaaataccaaagctttcctaaccaaagaaatttgatcgttcgtgtcgaatttttatgcattttctgattaaaagtcctatattatgcacaaaatatacatttagaattttcagtaatattacaaatttgtaacagacttattttcgaaacattcagtttttacaaagaatgccgtagttataagttttgcaaaatgcaaatttctatacttttacaattctattgtgtcaagatattagcaaaaaattacaaaacgttaacaaagcacacaaggacgctaatttctgttatagtctttcttgtcgtttaattacgagagataacttataacattaattttgtcacacggacattacgaaaatattttagatttaaaatttttaggaggatatttttaaaatgaagaaaatcgctacagctactatcgcaactgcaggattcgctacaatcgcaattgcatcaggaaatcaagctcatgcttctgagcaagataactacggttataatccaaatgacccaacatcatatagctatacttacactattgatgcacaaggtaactaccattacacatggaaaggtaactggcatccaagtcaattaaaccaagataatggctattacagctattactactacaatggctacaataactatagctacaacaattacaataacggttatagctacaataactacagccgttacaacaactactcaaataataatcaatcatataactacaacaactataatagttacaacacaaacagctaccgtactggtggtttaggtgcaagctacagcacttcaagcaacaatgttcaagtaactacaactatggctccatcatcaaatggccgttcaatctcaagtggttatacttcaggacgtaacttatacacttctggtcaatgtacatactacgtatttgatcgtgtaggtggtaaaatcggttcaacttggggcaatgcaagtaactgggctaacgcagctgcaagagctggttacacagtgaacaatacaccaaaagctggtgcaattatgcaaacaactcaaggtgcatacggtcacgttgcatacgttgaaagtgttaacagcaatggttcagtaagagtttcagaaatgaactatggttatggcccaggtgttgtaacttcacgtacaatctcagctagccaagctgctggttataacttcattcactaatttgtgatgaaagtgaattaagccaacaaggttttaagagccttgttggcttttttaatttctagacatcaaaaaatcggattggtggaaatctcaaaacttcgattttcaccaatccgattcactctgtaataaagaataaacaacatacagccattgacacacccaaatttaggcgcgtcaaatcggctatacattgataaatttttagttaaagtacttacaaatatacttgccttcaaattctcaattaatttagtcattacatgtcatgacataaaacttacattacatatattaacatgttccgctacaaaacatattcagtatatgtatagaggatatttattctaagttaaaaccttttcaaattataaccgctacaattataaatgattaaagtgtttcaacatattatatatattccacgctcacattaagttaaacgtgaattcgatgactttttaatacctatccctgtaaaaccatagataattgctataattgcgcataaataacatggtactgtccatatgaaaaattctccaacagagacatgaagttgattcgtatagtaaatacccgatgttccccatggtattaaaggtaagaccatcgtacttgagtcttcaagtgttcttgataaaacggaacgagagacttggtatttttcgaacaaatctttcattaacacaccgaccattataattacaatcgaagcaacacctgcagcgaatacaagcgcaatacaacaaataacagtaatacatattaaacttcctacagaatggatgcctttagaaatagtagttaataagacttctaaacatcctgctttttctacaatacctgcaaatgcatacccgcaaaatatcgttactaatatttgggtcatactcatcataccaccctgttctaacaagcttttcacactggatgaaatatgagactgatgtatcattgagtcgttaaaaccactaaatattgctttgaaaccatctgtcattttgaaatgatgattaaaagttcccactataatggcagaaaagcttgatattagcatagctggcactgtagccattttaaatagcaaacaaacaatgatcacaattaagggaacccagacccatatgttaatttgataaatatgtgcaagctctgataacaatgtttgaatctgcttatcatttgaatgccctttaaattgaaatccagcaataaaccatactaataaaccgatgattgacgcaggtattgttgtccacatcattgaacgaatgtgtttaaatatattcactttagtgacaagcgccgctaaattagttgtatctgataaaggtgacattttatcgccaaatacagcgcctgctataatagcacccgcagccattcctggtgagatacttaattgattaccgatagaaataagtgcaatccctgcagttgatgcagagccccatgctgtaccagttgctacagatgtaacagcacttataaaaaaggctgatattaaaaaatagcttggattcaataaatctaagccataataaatcaaggctggcactgtgccagaaaacatccaactgcctactataattcctaccgctagtattattaaaattgcaggcattgcagtatttaaacgttctgcaatgcctttttctaaatcttgccatgttaagcctacacgttttgcaatccatgcggcatatgctgaggcaataattaataatacttgaattggaatatcaaaaaacacaaagcctgttacaacaacaataaccattacaatcattgtcgaaattgattctaaaaaggttggttttcttgtcatcatctatcgtccccttcgcttattgatgagaaacctcttttcttcaatttattgcttttgcataatgctatatccttttctatcttcaagccatcatttattttaaatatttttctaaatcaagcttatctaagccaatggattcaactgttaacccttcttcaaagaaatctctttctaagattgtcgatgcaatgacaattactgcatctatatttggtgtcggtacatcaataacacgacctaagcttgaccataatactaaaccatatgcaatatcctcagttaaatatctgctttctacatgatttggtcctggaatttgtgaaaatactgggcttgtattaaacaaacgatttaatggttcatcttctttatcacgttctaaataaccacgttcaatacgtgattctttagctgttgataattcaaaacctaatctacggcctaaatttaaacgttctaattcgattgcatgaagtaatctaactgtatgtttagtaattccttctttatataaagcgaactcaccagcataatcaatacgaccgacattcaataatgttggccctggatgcacttcaggattaccattttcaagatttgttttaattaagctttcctcttttactaaatgatcataaatacttgaaactttgtcataacaatcatttagacagcttctatcatatgttgaaaagaagatacgacgtacatttagagataaatcaactgctgcattttcaaaatcgacacgcgtaccatacgtcaacgtattagcttctgctaattgtggttttgtttcaatatgtctatcttctaaaacattcataaaacgaattgaccccattgctgcagccatgttgaagaatatcaactgattatcagttacatgctctgccattacatcagcataatactctatgtatgaagatggaataatcacttgaacaatttcagcatcttttaaaacatattccatatcatcactaatatcagtgaattttacgaaacgttcttcaccttcattattaaaatcaaatccgcccttttcgattgcgttttgaaacttacttatagattgattacgacaatataatttaacatcgtggcctttgctcaccatatctactgctgccgtaactgcgccatttcctgatcctacaattgctattttcataaacaaccctctttctatctttggttaaaattaaaaacaaattatacgtaagacaatataaaaatgatgcgaattcattacgcatcattataaatgttaagtatatataaccttaaattaacctatttaaacgccgacgtccaccaattatttttatttttaataattgtttaataaacatgtttatttttgattatattttgttatagttaaagataatattacaattttcaaaggagtgtctaatatgacaactgaaatgaacgacgtaacaaatcatcaaccgaatcgcaaatccaatgatgagaacattatggcgatgcttatctatttattaagtttattcacatctattattggtccactgattatatggttattgaaaaaagatgaatcgaaactagttgatcgtgctggaaaaaattatcttaactatacgatttcttatattatttggtctatcgttttagtcgttatcacttttataggcgttttcctaattgctaccgatattgatttcattatcattataggtttcatcatcacgtttatcggtattttatccatattcgctttctcaatattatcttttgtattcacaattattgcgtgtgtcaaatattataatggccaagaatatgtaatacctttaacaattcgattcatttaaacatattacaaataaatatttcctattaattatctgttaatctcactgtaactttgactaatttttattacaaaattagtcaaagtttttttattcttttacaaatcaataacattccccacaagaagcattaattttgttaaagtaactattgtcatcaattcgagatgtgagaataaaacagtcgctacgttttatttataaaaaaagatatagaactttggaggactttattcatgaaaaaattagtaacagcaactacgttaacagcaggaattggtacagcattagtaggtcatgcacaacatgcagacgctgctgaaaattatacaaattataacaactataactataatacgactcaaactacaacgactacaacaactacgacaactacatcatcaatttcacattctggtaacttatacactgcaggacaatgtacttggtatgtatatgataaagtaggcggagaaatcggatctacttggggaaatgctaataattgggctgctgctgcacaaggtgctggattcacagtaaaccatacaccttctaaaggcgctatcctacaatcttctgaaggaccatttggtcacgttgcatatgtagaaagtgtaaacagtgatggttcagttacaatttcagaaatgaattatagtggcggacctttctcagtaagctcaagaactatttctgcaagtgaagcaggtaactacaactacatccatatttaatataaacacgatgatacatattgtcttgaaacttaattctagtacatatgtcatcaaaaactttgagctttcctttataggagaagctctttttttgctatttttcgttgccacccacttatatatatttttttctcccatattcataatattaatttttttcaatactattaactttaaaactacgttatctaatttaattgatccagttttccacattacaatattcatagtcctacagtgcctaagttatatcacctccatcaaaagtacacgcttacatcattgatacacaagacattatgacatagttgtatactgtctaatcttctactatactaagataaaaggagtgatcttttatggaaaaagtttatgttgctggtgcaataccagaagtaggtttaaaacttttacaagaacattttgaagttgaaatgtatgaaggtaaaggattagtcgataaagacactttaattaaaggtgttaaagatgcgactgccttaattagtttattatctacaaacgttgataaagatgttatcgatgctggtaaagacttaaaaatcattgccaactatggtgctggttttaataatattgatatcgagtatgctcgagaaaaaagtatagatgttacaaacacacctaaagcatcaacaaacgcgactgctgatttaacaattggattagtacttgcagtagcgcgtcgtattgttgaaggcgaccaattatcacgtacaactggatttgacggatgggcacctttatttttcagaggtagagaagtatctgggaaaacaatcggcattatcggtttaggtgaaattggtagtgcagtagcgcgtcgtgcaagagcatttgacatggatgtactatacacaggacctaatcgcaaagaagaaaaagaacgagaaatcggtgcaaaatatgtagatttagatacactattaaagaatgcagattttatcactatcaacgctgcttacaatcctaaaatgcatcatttaattgatacagaacaatttaaaatgatgaaatctacggcgtatttaatcaatgcctctcgtggtccaatcgtgcacgaacaagcactagtgcaagcattgaaaaataatgaaattgaaggtgctgcacttgatgtatatgaattcgaaccagacattaccgatgacttaaaatcacttaataatgtagtattaacaccgcatattggtaatgctacatttgaagcacgtgacatgatgtctaaaattgttgctaatgctgcaattagtgccgttcaaggtgagaaaccacaatttgtcgttaactaataattgaatttattataatgacattataaaaacaagaccccccatatgttgagctctcatttcaacatacgggggttttcatattgttgtattacttttctttcgatttatataagaatttagtctgtccagctgctaatgcatttggcatcattttcataatacgatttctaactgcaacaactaaacgactacgatattgggcaattttaccgatttttctagaacgtttaattacttttgcagtatgtttgacacgtattttatcataacgctgtaatgctttttcaaagtcgtatgcattaaaacaatttactaatacgatagcatcttccattgcttgtccagcaccttgccccatattaggcgttgtcgcatgtgctgcatctcctagtaaaatagtacgaccataaacaaaagatttgagtggtttcaaatcataaatattatgcaataagatacctgtttcactttgtttgtctaagatctctctaacttcatttggatagtgattaaagtatgcctgcaaatgaggtttaccaaacgaactatatttatgattgttttccttcgagttaattgtaatgaaccaatatgcttgattatttaataacggaacaatacctactcttccttttcttccccagtattcttttgcacaatccggatgttttaaatcaatatcatcaattaaacctctaaagcatgtatacccttgatataatactttactgtcagcatttacagattgtctcactttagaatgaattccatcagcaccaatacataaatcaaatgcttcactctcttgttccgcgaaatgtatggtaactttatctgtctcattatctatatgcgtgacttcatgatttgtaaatattgcatcatcttttacataagatttaataatgtcaattaatgtttggcgtggtaacgtcacattcaatgtattactttttaatttaacagtagttaacgggcgatctttgtcatctaacactgtcattgtagataagatttgcccagcatttttaatacctttagctaagtcatgattacctaattttttaagcacattatctccgataccaatcccagcgccaatttctttaactgactcatttttttcaaagactttaatagtatgaccttgttcttgtaatagtgcagcagctgttaatccaccgatgcctgcacctataattgctatcttcatattgtcacctctatatttttcattcttttctattttatcacatgcactattgtttaaaaatgactcttggaactaacgtttcatttttaaagacttaagtgtattatctgcaccattgtatattacatgcatatttagacagcaatattcattcacataatgtacatttgtaacaatgatgtgggagcttgggacataaatcaatgtcctagggtctataatattatattggcagtagttgactgaatgaaaatgcgcttgcaacaagcttttttcaactctagtcaggggccccaacacagagaatttcaaaaagaaattctacaggcaatgcgagttggggtgtgggccccaacacagaagctgacgaaaagtcagcttacaataatgtgcaagttggcggggccccaacatagaagctggcggaaagtcagcttacaataatgtgcaagttggggtgggacaacgaaataaattttgtaaaaatatcatttctgtcccactcccgcgttttatgttaggttaaaatccttttaactaacacactcagaatgcgctaaaggagctcgaaacaataaattgttccagctcctttaagcaccgatgtcttatttataatatgtttgtctaatatcatctttctttataccaaactgcttataggatttatccattaatttggcaattttatctgcccagcgaatgtcactcgcatattgatgttgcgcaggattttctggattccatcgcatttgatataaattcagttgattgttttcaaaatattcattacgaatgaactttgcaccaccaagaatcgccttatctggtgatgtccattgttccttttcagcataacttttcccactacgaacagcactactatcgaatgctcctataccaaaaaagttgtaatagcgtttttttccatctttaatgccttttgctaattctgatttgccgttacctgtttctactaatgcatggctaacaagataaatgacattaacctcatatttttcttgagcttctagaaaaactttccctcgattttctaaaatccccttaccttttagcaattgattaacttcagattccgacattggcactttttctgtgatatccatatacttcatatcattgtctttatgtgaaatagtcattgctttagcaatttcattattatttgcttcaacaaatttaccatcctcttcttttgtctgtacaatacctttcccttgttgcattgaaacagcctcatcaaaagagtaattcacatcatttttaaacaatttagtttcattcacgatgagcaatacagaaaaaacaactaaaataactatcaatagtagcgttgaaatacgtaacttgaaattcttcttcatatagacaaaacctcatttttcttacttagacaataaaaaatatgccactacaatcgctaatattacgattaaaaaagaagcgttaacgattactttcatcgttgttctatctctgaacatcatattaaagacaactagactaattgataatgaaacagcaaaaaaagtaatagctaacactaatttcatcataaatagacagactaaacctatgactaataatgtattagaaattacagctgacgtttttaacattctcgaattaatatgcactcaccctttttatttaaataacttacataatcataataatacatgatgtttcatagccctgtcgatggttgattatcaatagcacatgattttctcgattctcaaaaatattgtttgaagtttgatgaagactcggatacaaaataatatttcaatataacttaaaacagtgcccctacaccgacatgcagaaacactgttatattcaaaaacaaaaaatcggaaagatgaaaagtaaaaaacttttacatcaatccgatttattatagactcatattaatcttctcgagacataccttttaacatattaagcatatatgttaaactacggttcatgtcgtcatcttttaaaacgccaaacagacttcttacagatgtcttcgcattaggactcgcttgatttgcaacatgtaatcctttattaactttattaaggaagtcacttaaatctgatacatttaattcacctaataaaaataccattgatgccatattagataatagtcctgtatagatatctttgttgagctcaacagcaaatttattaataatcacttgacgtcctctaactgcgccatttaaagcatctaatattttagcatcatctaacactttaataagtttgattgcttttaatatactatctttattcgctgcaattgcctctgtaacttcatttaaactttctaacttaatttgttcttctgatttttctaagcgtctaattttagaagatattctctcagccattatttatccacctgatttcctgggaaaacataatctggacgttcccattttttctgtacttgaacactgtactgcggatgacgttttttattgacacggaaattattagggttcaacggtgacttaccacgtttcgtaattacctccaaacgacagcttgtacgtttataagatggtgtatccgtgtattgatcaacatcactattagttaataagttaattgcgcctagatctccattttccatcgcatcattatttaatggaatatagatttctttacctttaacacgatctgtcacgtgaacttgtaataccgcttctcctgtttcagatatcaacttaacttctgcaccttcatgaatgcctctatcttcagcaagttctggagaaatttcaacaaatgcacgtggcactttgtatttaagcattggtgtttgatatgtcatgttaccttcgtggaagtgctctaacaatcgaccattgtttacatgaatatcataaacttcatcttgcttaaagtaattatcaaatgataatgggaataattttgctttaccattatcgaaattaaatccttctaaataaagtattggttcatctgtaccatctggatgcacaggccattgcaaactattaaatccttctaaacgttcgtagcttacgccagcatataatggtgttagtctagcaatttcatccataatttcgcttggatgcttgtaattccaatcgaagcctaatttattagcaattgcttggaatattttccagtcaggtttagactcacctaatggtttcaatgcttggtataaacgttgaatacgtcgctcagtattcgtaaaagtaccatctttttcaagagaaggacttgctggtaagacaacatctgcaaatgtagctgtaaatgttaaaaattcatcttggactaccatgaaatctaatttttcaaaagcagcttgtacaaagttaatatttgaatctacaataccagtatcttctccatataagtataatgagtgaatttgcccatcatggataccttcaaccatttcatgattatctttaccagcttttggattcaatttaacgccatattctttttcgaatttagcgcgaatatcgtccgcttcaatactttgatagccagtaattttatcaggcatactacccatatcactacaaccttgaacattattatgtccacgtaatggatacgcgcctgtaccaggtcgacgataatttccagtaactaataataagtttgaaattgctgtacttgaatcacttccaatgtcttgttgtgtaatacccattgcccaacaaatgacaacggactcagctttggcacattcttcagcgaacttaatcaactctgcttctggaataccagtagcctcttcagcgaatgccattgtaaatgtttctaatgacttgtaatattcatcaaaatcttcaacccactcttcgataaaggctttatcgtgtaagtcatgatcaatgatatatttcgtcactgcgcttaaccaagccaaatctgtacctggtttcggttgataaaaacgatctgcgcgttcagccatttcatgttttctaatatcaaacacatgtattttttgtccaaataatttttgagcacgcttcatgcgtgatgcaataaccggatgtgcttcggctgtattcgtaccaatcaatacagacattgctgctttttctaaatcttcaatactacctgagtcaccgccgtgtccaaccgttctaaataagccttttgttgcaggtgcttggcaatatcttgaacagttatcaacgttatttgtgccaataacttgtcttgctaatttttgcattaaatacgattcttcattcgtcgctttagaagaagaaatgaatgataatgcatctggaccatgcttttctttaatagatgtaaaattatctgcaatgacatttaatgcttcatcccattctacttcatggaactcaccatttttccttactaatggtttcgttaagcgttgatctgaattaatatgtccccatgaaaacttacctttaacacaagttgcaattttatttgctggagaatcatgtgatggttgtacttttaaaatttctctatctttagtccaaacttcaaatgaacagcccacaccacaatatgtacacactgttttagttttcttaatacgctctttacgcatttctgcttctgaatctgagattgcaaatagtggaccataaccaggttctgcttttttagttaaatcaatcattgccgctaatgaaccaggttccgtatcagtcatataacctgcattaccttccatgttaacttccatcatcgcattacatgggcatacagttgcgcattgaccacaagatacacatgacgattcattaatcggtacatcattatcccaaatgacacgtggatgctcacgatcccaatcaattctaattgtttcatttacttcaatatcttgacacgcttctacacaacggccacataagatacattgatttggatcatagcgataaaatgggccataatctttttcatatggcttctctttatattcatacgtttgatgctgaagcccccatgcatccatcgtattatgaatttcacaatcaccattattataatcacatactgtacaatacagcatatgcttttctaaaattcgatcaagcgcttctttttgagcatctttcacgtcattattcactgtatttactgtcattggacgatcaatcactgtactacatgaacgttcaattttaccatcaatctcaactgtacatgtatcacacgtttgtatcggtcccattgattcgttataacaaattgaaggcacaaaagtatcttgcgatttaatgaattcaagtaaatttgtacctggttctacaagataatctttaccatcaagcgtgaccaccaaatgttcttgcatactattcaccccatctatatatttttccgtaaatgacttttaataaattgcctaatttccacctaaaataaagatgccccacacatctttcagatagaatcaatataattgtattactttaagtgtataatgttaagcgtatttttgtattttttatttttgcaatcatttttatttgaaatattttgcgcgaaattaaatcatctttttgtttaattgaaaataattatcattattagttttccaattatctgtttcacgctttttgccatatctttcacaaccttattaatgacaatacttaataatcacctcacctaaaaatcgttatactatttataaataccctttttctgaaaattaataacccaagtttgataaatatctactatcatttagaaggtaagatttatctttaaattaaatttgtaatggattaatttataaaaatcaaatcaggcattaaataaaatagcccataaatacaaagtgttatcaccttctatttaggggctattagttctattcgtcattctttttacagatcattctatctaattaatttgtgtacaattttgataacttattttcccttagtttactactctagattatcttttaataacttagtactttcagcttttgactgctcactaggaatgaagtagtacaatccgtcactttgaatgccgccttgaccactcaattgatgtttattaatcgtgtcattagcatctttataattgcttctaatcgtattcaaatcacctaatgttaaatctgttttaacattattttgaatttcattcattagactattaaaatgtgtaatcgatgatgggcttgcaatcttattagccatcgcttcaagtacaatttgctgacgttgttgtcgaccaaagtcaccaccagcaccttcttctttacgacttctaataaacttcaatgcttgatcaccatttacatgtgtttgctgtccttttgtaaaacgaacaccatcaacagtgaatgtatcattacttactacatcaacaccgccgatgctatctatcatattatgcaaaccatccatatcgattgtcgcataatgatcaattggcacattcattaatttttcaagtgatttaacagccatatttggtccaccatatgcataggcatgtgcaattttttcagtagtatcacggccaacaatttccgctcttgtatcacgcggtatacttactatttcagttttcttcgttttagggttgatagataaaatcataatactatcactacgctctccgccaccctttttcttacgatcagcatctgaatcgacaccaaataaagcgattgtgaatggatcaccatcgtttaaactcacttttttatctcttaattctgaatgattgcgatctaacggattgtgtatcttattaccagtaataaaaattttagcagctacatacacaacagctacaatcgctaagattactaaaataccgaatacccataaaaatatttttttcggtaggctcattttacttttagacgaacgtttcaatcccaccactcctttactattccttacatactttgtctgttttctctatttattatatagtaaaataatttttttactatacttctgtagacgtataactattttttatcattttttatctctcgagaatatctatctgtatttttgataaccaccatttgcatttaaaattttaagtaccgtttcatgacatgctttattacttataataaaaggtgcaccctttaaatgatcaattgccttaccatctaaagttgtcatttttagattcaatagttctgcaaataaaaactgtgcagcaatgtcccaaggtttaggatttgtattaatatgtgccccaaattgaccttttgccactcgcatagaatctaatccgcaagcaccaactaaacgataactaaatgaggcgtcaaataaatcttgcaccgtatccagattcatcacttgtgcattaaacgatataatagcgtcttccaattttaacgatggtggttcttccatcttaattccattacaaaaagcaccttctcctcgtattgctttataaagctttttatgcggataatcatatacgtacgataacattggtttaccttcataaaaatacgccaatataatacaataatcttcttgctgttttactaaattggcagttccatcaatgggatccataatccataaatgattaatttcattcgtaatcatttcattacttttttcttccgctaatagttggtgttcctgaaaatgtgttgctaaaaattgttgaaattgttgttgaatctgtttatctacatttgtaactaaatcaaatcgatgacgcttagtttctgtagtcatctccataattaattgaggaataacattgtctatttgtttcaaccacgaacatattaacttatctatttgctgtaatgttttatctgtcatttcgtccaccacttctcatatcattatcattttattattaccctatattaaaagaatcaacaatacaactgaagacttcttcattttatgcataaaaaaatcggctagtcacgtgctagccgacaaatagaaaggaaagtaagtaataaatattgaagatgttgtgatgtaacttgaacgattaaaagctatctgttatatagctctacccctttgtttaatcgctccccctgttacaagtaatatcatagcacaatcttttttaaaatgtaagcgttttccacaaaatttttccgatttttttaaaaagatattgaaaatgtcctcattgtcactcttatgttatactttgtgtaatatatcatcttttaggaggtggctgtcatgaataaagctgaaaggcaaaatttaataattactgcaattcaacaaaataaaaaaatgaccgctttagaattagctaaatattgcaacgtatccaaacgcacaattttaagagatattgatgatttagaaaatcaaggtgttaaaatttatgcgcattatgggaaaaatggtggttaccaaatacaacaagcacaatctaaaattgcattaaacttatctgaaacacaattatcggccttatttttagtgcttaatgaaagtcagtcgtactcgacattaccatataaaagcgaaatcaacgcaattataaaacaatgtttaagtcttccacaaacacgcttaagaaagttgcttaagcgcatggacttttatattaaatttgatgacacacaacatatgacactcccaatgttgttttccgacattttaatttattgtacagaacgaaatgtgatgttagtagatcatagggttgatgataatattaaagccgaaaacgttatatttattggccttttgtgtaaacatggacattggcatgcagtcatttatgacattgctcaagacaaaactgccgaactcgaaattgaaaatattatagatatttcgtattcattcggtaagacgattcaaaccagagacatatccattgataactatcatcaatttttaaaccccatcgattcctaaactatggagtcgacggggttttatctacgcataaatacttattactgatataacgaaagaaacaaaattatttgctatatgtaatgcaattgttgaacctaggtttcttccagattttatataagtgaaaactaatatgatggatagtatgagatatggaccaaactcaaacggcgactttgcatcagtcacatgaataaatgcaaataagaacaccgaaacaatactcatagctataaaattaaacttcttacctaattctccaattaaaatatgtctaaatacgatttcttcaactattggacctacaatcacaattaataagaatgctacaggtaaaaatacaggcacttcaaacattttatttagctccagttcattggctgtttcactatattgcaaatgtttaggtagaaactgtgtcatatattcatatgtataaattaagatgagagcaataatatacgttattgacaatctaagccaatattttttgatatacgcaaaaccagctcgaagccttgatggcatcacttttaaatggaataaataaaatgcgccaatcccaatcgtatatgctaaagcttgtgtgatagtccctacaaatatcagattactatcgatttcataataaccaaacaaaattggtactatgtaagctgcaattgtgagtgcaaatgataatacacctataattggaattataaacaaatctctccatgctatatctttaaacgtgtatttctttttttcattttccactgttatatcctttcctgtttaataattgatttttggaggtactactacatgataaacgaaactaagtatatgagacaacaaattactaatttgattcaaatcattgatacgattaaatataatactttaatgacagattggaacattcaaacgcatatttataaatttaaccaaatagttactaatgaattgaataagttcaaaggctttgaaacatcatatataataaacgaaaatcaagttttctattatgaaattataacactacttaataaacgtcccctccgacaagtcgactatggtaacaaaattcaatatcttaatttttatcatacagaactatctaacgcattatttgcaattaaatttgcccattaacctatttttcataaaatgtcatttaaacaagttatttattaaaattcactttattacataaattatacaattaaaaagtttcttcaaattgtaaagatgcattaatcgagttataatcataatgattaagatggtagatttagtctaatataactacatttactaagatttaaatagatgagtacataatgtataaattgggaatatacagtatgacttacggtaatatatcagtatattgatatattatttgcacatgggagtatgctattttttatctatacatcttaaaaaaatttacagttttataattcaatatcattaaacaaacaacatattcagcttatttttcattctcttacgttacaagttgtaaataccatcgcgttaaacaacaatagccaacgctaataaaatatattgcgttaaagtggagtgattaatatgtcaaacgtactaacagaaatagatagtcaatatccatatatgactaaaaatgaaaaaaagatagctaaatttatactaaattcacctcaaaaggtgattaaaatgaggtctcaagacttagcaagcttattagatattagtacatcatcagtcattcgattcagcaagaaaattactgatggcggttttcacgacttgaaaataaatatatctaaatatgttcctaaagcatcatcaatttacaatgttgaattaatgaataacgaaagcacagaatctttaagaactaaactccatacacgtactacacgcgcacttaatcatgcaaataacgaattaaatgataaaactattgatcaaatatgtcattgtttaaaacgttctgagacgatttttatatatggttttggcgcatcttttgtagttgctaccgacttataccaaaagttatcaagaataggtcttaatattcaacttgttcaagaaacacatatttttgcaacattattagcaactcacaattcgaacgatagtgttattcttattactaacaatggtacacaaagtgaaatgcaatcaatggttaaagttattgatgactaccatatacctataatcacaattactagtacaagggataatcccgtagcacaggcatcaaatattgttttaacttatgggaaaacggatgaaaatgagatgcatatgggagcaacaacttcattatttgctcaaatgttcactattgatattttatattatcgttatgttgcattaaattatcacgcatcattagattacataacacaatctaaaatggctttagacaactatcgtaaacatttatcaaatattaactttaaacattaacagtcttatataaattctttaatcatgtcatataataatttatgcatcattttcaaagcttacatgtcttttatcttgtataacatacgcatatgaccaatgatttgataaggccattctatttcttatattaaaaacaaacgcagttgattaacggattcattccatatatcaattgcgtttgttattttaataatgctattttttattttaaagcccacagtaaaaactatcgattgtatacccttttaaaggtaaattcttactacaacttcgatttaagctatatttataaaaaaatgcgcctactcataacacttctttggctatttaactttaataagctagggccaagtttgtcataaaataagcgcacattataatcatactattttgcttttacattatttttattatatctaataaaataataaatcgttacaatcgttaagaagatgacaccaataagcactgatattctagtttcaacattaaataccataccaaccaatactaatattaagaataagattgttaagtagttacttactgcgccaccaggcattttgaatgggtgaccttccacttcttcagggtgtaattttctaaaacgtaagtgactgaataaaatcataaaccaaggaatcatacctggtaaaatagacgcactatatacgtatacgaaaatactcttcgctccatcgatatataaaggtaaaattacatttaataaagcaccaattaaaataccaagagatactgcaacaacagtgtacaatggcacaccatttctcatgattttagtaaatattttcggcatttcacctttatgagcaagtgtataaatcatacgactcgcactgaaaatacctgagttacatcctgacattgctgcagttaatacaacaaagttaattaatccagctgcaaatgtaataccgattttagcaaatgttgcaacaaacggacttccaatgtctcctaattgattccaaggatacacagaaacaataacaaaaatagcacctaaatagaaaattaaaattctccagataacaccattcactgctttaacgatatttttctgaggatctttagtttcacctgcagtaatacctatcagttccacaccttggtatgaaccaattacaattgataatgcaaagaagaaaccaacaataccatttggcataaatccgccatttgtccatagattagaaatacctaccgcatggccaccatttccaaaaccaaagaaaataagaccaaaaccagcaataatcattaaaataattgttacaactttaattaaagcaaaccaaaattcaaattctccaaacgcttttaccgagaataaattcgctgccatcaataataaaatagcaataataccaggaatccaggttggcaattccgggaaccaaaacttcatatattctcctactgcgatgacctcactcataccaacaacaatccattggaatatattactccatgctgtcatataacctgctgcaggatgtatataatcacttgcaaatgttgcaaatgatcctgttgtagggtttaaataaatcatttcccccattgctctcatgattaaaaataaaaagatacccgcaattaaatatgcaaggataactgatgggcctgtccatttaattgtacttgtggcacccatgaaaagccccacgccaatcgtaccaccaagtgcaatcatttgaatttgacgggcactcaatcccctttgtagttcattgttctccataacttcttaccccatctctgattgatactaaataaatccataaaaaaacttattgccgtaattatactataaattatcgattttggtacattaatatttgcataccatgcaatcgtttacagaactactatagcaggcttttgcaactttgcaaacaattattttgtgatttttctaaaaaattaaaaaagttgtccatgaaccgttgggtcacatacaacttcagctattacaagtaattatgatataattttaataatattaaaaaggagtatatcaatgttaaaacaaatactgccacgtgctacaaaaatatcggtaatctttgctgtagcatttttcatcataaattatatcggtatggaaaaacctgacatcctatatttagttggaagaactattattgcaacacttgctttcatactcatttgtcttacattatttactattattaattctccagagcgcaagattaaactcggtacgactttaccgattgcattaattattggtatcattttcggcgccatatttttaacggtacaaatcggtgtcatcactgggttaatcatcggtgtgattgctacgtttgtttgggaattgattgaaaaaaataaaggaggtcgttcatcatgacaacagcattaattggtgtaattgtattaatcttactaattattagctttgtgccaaactaccgtgctatgaaatcagcaaaagaacaaggaagtaatgcaacaagagctacaattatggtaggcatagatattatcttaattgtacttatcatcgtgacgttattattaaaatatatgtaactatttaaaccaccctatctcatacataaacatgaacgttctaccatttcacatacatatggtcgtccatttaatgaggtaaggtggttttctcgttaaagtttaccttgtaatagtaaaaaatagccaattgttgcgagtattaagtaaatcattgaaccaacaacaaaagatcttacttgcacgcgaaatggtgtctgtttgttaaatataggaccaatcaccaaatttccaacgcctaaaattactggaccagctagaaaaaacaatataatgtaacccatcataatacgcctcctatttcgtaaagaaacgcgctacaatttgatcgtaatcaatatcttttgctacataatctacattagaaaagtcctgtgcgcttgtcattttattcgtattaacaataacatctaatccagctgcaatcgcggctgttgcaccatttacagaatcttcaatagccaaacattgtgtcggcatataatttaattgttgtactgcagataaatataattcagggtcaggtttaacttgttcaacatcttctctaccaacaactacctctatataatcgtctagacctaatgctttaaaggtaggcattatttccgatttaacactacttgtggcaatcgccataggaatgtgacgttgctttaaaaatgccatcaatgatttaatcgtatcaatcatcggtaatgttgtactagtaagatgatgttcttcataaagtttatctttattttccgaaccaatcgctttaattaaatggtcatgcaaatctgtagctgctcctccaatagaagaacgataaaaatcaatgcttataggatcggcattatgcatctctaaatgtttattaataacattaaataaatgttgttccgtatctattattgttccatcgaaatcaaatataactgctctatacatatatttactcctctattttttctctttatcaaagcttaacatagtccgatgaccacttcattctattagtgcaattataacttttttgaccaatactttgctaaaattggccctgttatattatgaatgaaactaaacactgcgcctggtactgctgcaattggattaaaatgcaatgctgctaatgacacagctaaaccagagttctgcattccaacttcaatactgactgctttttgatcttgtcgatctaattttaaaagacgagctaaccaatatccaatcgtataccctaatacgttatgtaaaataactactaaaaatattaataatcctgtagttaagatttggtgcttactgccacctacaactattgctaaaattaatgaaatagcaacaactgatataatcggcaaagctgtagaagctttttcagcaattttacgattaataatttgcaaaacaatacctaaagcaattggaattaatacaacttgaacaactgaccacaacatactcaagaaagatacttccaaccattcatttgcaaatagatatattaacgcaggtgtaacgaatggcgctagcaacgtagagaccgtcgtaatagaaacagaaagtgctacgttagctttggctaaataactcattacattacttgatgtcccacccggacaacatccaactaatattacgccaacagcaatatcaggtggtaaattaaaagactttgcaattataaatgctaatgtgggcataatactgaattgtagacagacaccaataattactgctctaggtgctttaaagaccattttgaaatcattaggtgtaattgttaatcccatacctaacataacaataccaagtaaataaggtacccacttacctaatgtcgcaacatgttgtgggaaaataaatccaataacagctgctactaacatccataccaaaaaactcttcgtggcaaatatactcaatttttgaaacattgttaacacatcctcgtcgataatattgaaaaatattaccataagaccagtaaggttacaattacttttctgaaaattaagattatttagccattctctttttattgcaaatattttatcactgataaacaattattttaaacttcattcaaaagtcttagtgaataaagaaaaaaagcgtggtaaaatcaacttgaacaaaattaagtcacctttataaatattaaacgtgtatttaatgccatgtattcctcgggaggtcctcacatgttaattgataaattcgaaacatacatcatcaacatcgccggtttaaatgaccgtactactagaaaaaaattaagtaagttatgcaaaagtgtacaattttgtgatgcgttgcaattctcaataaacaaacagtttaatcagtatgtattagaaattagcttaccaaagcaacaacttccatacttcatttcatttttaagttttcatcagtatagtattttccaagtactttcaccaaagaaaataaatgaattacttgattctgataatttatatcaatctgcaaagcgtttcgatatcaatattgatggcttgcaagatgctttcattaaagacaaagtcatcgatattatgaatatgttccaaaatcacactgatatcacttatacgttgaataagtctcatgcgcatattatatgtacgccagaaatattcgctaaattgttacatacgattgcaactagaaatatcgacattctatctgccaattatagatcgtcatctatgagcaaagctcgtatatcataataaaagacacatctatacgatgatcatttacaatgattgcgtatagtgatgtgtctttttttgtattatttatcttcggacgattgatcctcaaccatttgttcaaatgcttcacgaacttgtggtactgtcatacctactacaacttggatactcttaccactctttactaatccgtgtgccatttgttgatgcgtgaaatattccgtatcctcaactttactttcatcataaacagttaagcgtaatcttgttgtacagttagtaacatctttgatattttctttgccgcctaaaccgtctaggtaatacgcagctttgtcttcgtattcattaccagttgaagcacgtttagggtcaacgttatcaccttttttatttttatagtcttgtttagagaataacttaacctcttcttctgttttctttcgtccaggtaatggaatatcaaatttcaaaattaagaatctgaataagaagaagtaaatcgctacaaatatcagaccgataataacttgtgctacataagtgccccaatgttcttttccaagtggtaaccagtttgttgaaataaagtctaacaaaccaccacccatatttcctacaacaccaaatgcgtacattaaagtatccattgatgctgctaaaactgcatgtaaaacaaataagtatggcgcgatgaataagaatgtaaattctaatggctcagtaatacctacaacgactgctgttaatgttgcaggaataagtaatgctgctacttttttacgattttctttaggtgtcgtagcatacattgctaaggcaatacctaaacatccaaatactttcccatttccttgaagcatgaagccataagggaattgctcttttaatggcttactgctcttagcaaactcatttaagtgttgtaaccattcagctttcaagccgtgattaactaccactggaccaacttcaattggtgcataaataaagtgatgtaatcctgttggtattaatacacgttctaagaagtggtacaaccatacaccgatatagcctgaagcgatgataaaatgttgcattgaaccaataccgtgctgaacagttggccaaataacacaagtaattgctgctactggtaacatcacaaaaaatgagattgtaaccacaaatgttaaaccttggaatacaccaaccatttctggtaatcgtttactatagtatctattgtgaatccaagtaataatagctgaaataataataccacctagaatattcgtatccaatgtggcaatacctgcaattgattttaaaccaggtacattttcaacgcctttttctaaattagcgccaaacgtatgtggccattgcgttaaaatggcatttataaatgtattaaacattaagtaacccatcaatgctgcaagtgctgcatgacctggtgcttttttagctaaagaaagtggtaaacctacaacaaatacaacttccatatgcgtgaaaataacccagccaccagattctatcactgaccaaaatttaaaccaaaacgtatgttgatctgctaaactccccatgattgtaggatttttaaataatgtcgcaaagccaagaactatcccaaagaaagcgaacattaatactggtacaatcattgcactaccgaaacgctttatcgcattcatcttctattccctccatatcatctttcctaacaatacatctaattagattcatttataaatagatgccttactatttaaatataatatatagtaaacgcttacacacctacaacgacattgacgtattttgaaagtattttgtataatcagattatcttttcatatagtgaaaattttttcacaaccttatatatgacatcgttgtatttgtaataaattcgttttaaaagcataatcaaacctatatcaatacacaaatatatataatgacatacaaggttttaatgtaatatcgatctatcacacatttattttcaaggaggttgaatatgtttttagatgaacacattaatcgaaactttgataaacttaatgacaatgatttacatatcgcccacttcatcaacacacacgttgatgaatgtaaaaatatgaagatacaagatttagcgcaattcacacatgcctcgaatgccacgattcacagatttacacgcaaattaggttttgacggttatagtgattttaaatcgtaccttaaatttgaaagtaataagacacaccaattaccatctaactcgatcgatagtttcaaacaagaaatcgatagtacattcagttatttagaacgcgttgattaccagcttcttactgaaaaaatgcatacagcttcaacaatatatttgtatggtacagggcgtgcacagttaaatgttgcttcagaggcacagcgtatattgttaacgttacataatcatgtcattgtacttcatgatgaacatgaacttaaaatgattttgaacaagagtgagcctaatgatttattctttattatttcattatcaggtgaaacacatgaattattagaagtaacaaacttgcttcaacttagacaaaaatactttatttctgttactacaatgaaagataatacccttgctcaaaaagcaaactacaacgtctatgtatccagtaacacattctacttaactgatggtacagactattctagcttcatcagttatcatatattctttgaaacacttgtaagaaaatacaatgagtatttattacatcatgatatttcaaattagaaaaaaggaagttatgatttaatggccttgagcctatcataacttccttttatcattttattgttgtgttgatgtttcgataacgtggtacatcttatcaaacatcaattcgaaaccatgcaccattgcatcatgatattcttttttcttttgcttgtgttctaaattagtaaatcgtctttctttttcaactaatgaacgataataaaatagcatttgggtgccacctgtttcacgttcaaaaaattctacctcaatgacatcttgtgtttcacttagtccaggcataccgatagtcatcttaacgtattcatccataactaaagattcataaataccttcaatcacatttactttgccattacgttgttgatctacaatacgatatttaccgccttctttaacatccgcttcaatctctttattcgttctggctgatgtcataaaccattgtttcaacaaatctttctttgtccaagcttcgtatactaactctggagaaaatttataaaacttttcaatttcaacttcgacatgttcattctctacattaaattttgccactgttgtccacccactttcgctcttacttttattttaacgtatttttgctcagttccaaacatagatgatcatcatttttaaaagattagcgttatacggtgagtacaacatgatctgttaatataacaagccaccttacttggctacatcgatatattgttaagcattactatttcatttcttgactagtgttcttttttagctttggaaaattaaataaaatcgcaacaagtccgcatacacctaataatataggataaatgctgtatgggaataacattaacggtgaaataccagctacaccagccgctgaaataacttgcgggctatatggtaataaaccttggaagcagcctccaaatatatcaagaatacttgctgatttccttgaatctacatcatattcatctgcaatatttttagctaaaggacctgacataataatagagatggtgttgtttgccgtggcaatatctgcgacacttaccaaactcgcaattcctaattctgcgccacgctttgatttcactttagagcgaacaaattgcaacaaccattcaataccaccattgtgttgaataataccgactaaaccaccaattagcaacgcaatcatagcaatatcttccatgcttataatacctttggacactgcatctagtagccccatccaactgaatgaaccatctatgagaccaatgattccggctaataatgttccgccaatcaatacgataatgacatttacacctaataatgctaataccaatactaaaatatacggtacaactttaattagattataatcatagtttttagcatgatttaaagaaatgccattcgttaagaaatacagaataataatcgttaaaatagcacctggcaatacaattttaaagtttactctgaatttatctttcattttcgtatgttgtgttctaaccgcagcaattgttgtatctgaaatcattgatagattatcgccgaacattgcacctccaacaactgtagccattgctagcgcagttggtacatctgtcgcttgtgcaaatccgtaaccaacaggtgctattgcagcaacagtccctactgacgttcccatagatatagaaacaaacatacaaatcacaaacaatcctacaataattaaattttctgggattaatgatagtcctaaattaactgtcgactttacgccacccattttttcagctgtatttgaaaatgcacctgctaaaataaaaatcaacatcattaaaataatgtttgaatggcctgcacctttcgtgaaaacctcaacttttttagcaaatgattcttttcgattcattaataacgccacaattaccgttatcgtaattgcaacatttaatggcattgaagtaaaatcacctgtgataatacctacgcctaaaaacaacgccacaaataataacaaggggaataatgcccaagcattgctctttttatgtacttccatcctttttacctgctttccaattaaaaatacctctttctcacaaacgatgaagaaagaggttttcatgtactttacctgcttatcttcaaaccattacggttactggaattggcacattcgagatgttgccgaggcttcatagggccagtccctccacctctctagataagtgatgcttatttacgtttacgttacaagataatccttagtacgtcaatcataaattaattaggagtcgtataatatttttcataaacaatcattgctactgtaataataatcaaaacaataatgctaataacaagtaaaagccaccatttaagcattaatgcaataaaaatgaacacgatagacacacttactaatattaatgatatgactttaaattgctgtgcgctttgttcagaaataactttcagctgtttgtttgatggacgcgtatttcttatactgattcccagtatattttctaatatttgaaccaatacgatacttattgtaaatataataaatgatataaaattatagtaacctataatagttgctccataaataacgattccaatgtagaatactcctgagagcacacccaaaaagtaagcaacacgtttgtcaaacttaatgatatgctttttaacgttttgatgtgtaagccatacattcgaaacaatcgcaaccactacaaacagtgtgaataatatatatactggcaacttttgttcaggaaaaacagtcgctattccaaaagctaatgctaaaatcaaaaataatatagctctagatactattaatgccataataacaacccctttgtttaatatcgagtttgcaaatttacgtttatcagcatttctatgatcagtacttctacgggcagcgtttctatgtaatttacatcatcttaacatataaatactttgctatataattgaaaacatatcctattattctttgtccgttctgacgtctaatatctaaccttaggcatttcacttggtaatgaatttaactttcttccactaaccgtccctaaacccaatcccacaacagtttttaactttttcgttgctgtcctgacatcctcattaagaaagtttattctgcttaaaacttataatccacaccctgagcaaacgctccttatgacaaagtattaaaataagccgataaagatacacacctttaccgactatttaaaatacacttcaccaattcattttaatttacttgattgaagtagctaaattaatattatgttgttcaattaaacgcttcatacaaacctaatctatttgcactccaccgctaacaccgaacacttgtccagttgtataacttgattcttctgacgctaatagcacataagttccacataactcaacaggttgacctgcacgacctaaaggtgttttttgaccaaatgttgggattttactttgaggttgtccaccagaaatttgtaatggtgaccagaatggaccaggcgctacacagttcactctaattccttttggtcctaattcttctgaaaaacttttagttaatgaaataattgctgcttttgaagcggcataatcatgaagaataggactaggattataaccttgtacagatgatgtcgtcgtaattgacgcacccggttttaaatattccaaagctttttgaactgtccaaaatagcggatagacattcgtttcaaatgtttctgtaaattcctcagttgtaaatccatgaatatcattatgatactgttgatgtccagcaactaaagtaacattatctaagccacctaattgttgatatgcttgttcaacaaggtcataattgaactgctcatctcttatatcaccaggaattaacactgccttttgaccactttcttcaatcacttggcgtacttcttgtgcatcttgttcttcactcggaagatagttaatcgctacatctgcaccttctttagcatacgcaattgctgctgcacgccctattgctgagtcaccacctgtaactaacattttatagccttgtaagcgatgataaccttggtaagacgtttcgccacaatcaggtgctggcgtcatttcagattgtaaacccggtacctcttgttcttgtttttcataatccgttgttttaaattttgttctaggatcttgagctgccatttttaacatctccttattcgcttaatggttattatttacccaatcttcccaggaacttaatcatgattacgctaaaaattactttcttctttaaaaaacaagctcgaattactcatgcaatagtctttttacaaattcaacaaaatactcaggtgctttttccaaaatcctttcatccggtttatattgaggatgatgtaaatcatattcactatgagaaccaattaacgcaaatacacttggaaaatgttgactataacctgaaaaatcttctccaatcgtaagcggctgttccatcatttccaccttatatccaacatgttgggctactgcaattgctttatgcgtcaatgcctcatcattcatcacagcgccaggtaaatgtgtataatttaaattaattttcatattatatgcttgagctaacccgtccgcaatatcttgtaatcgtgtttctacaagctttcgcaccacaggatcaaaactacgcactgtgccttgtacatacgcatgatcagcaatgacattccaagtattaccacatgatatttgtccaattgttactaccgcttcatcaaacgcagatagatttctactaactatggattgaatactattaatcaattgcgccaacacaataactggatcgttgcattgttctggctttgcagcatgaccacccactcctttaatatgaaactcaaaacgatctactgctgatgtaattgcccctgttttgattgcaaatgtacctatcggacgcgatgggtcgttatgaaaacccaataccgcttgtacatcttttaatgcatgtgtttcaataattttaaaagcgccatatcctagttcttctgctggttgaaaaatgaatttaacacgcccagtaagagtgccctcaatttcttttaactttacagctgtagccaaaatactagccatgtgaatatcatgaccgcacgcatgcatcacaccttcattttcagatttaaaatcctgttcaacaaactcttgaatcggtaaggcatctatgtcagcccgaaccgctatacaactcggtccttgtcccacttcagcaaccagcccagtcgtgagcggtaagtctaatattctaatatgatattctgttaaaatatctttaattttttgtgtagtcttaaattctttatcggatagttctggaaattgatgaaaataccttctccaggcaacagcttgatcttttaatcccatcggtcattccccttccttaagtcaatgatatgttgtctaccctacgatgatcatctttaactattaaacgatgatttcacaacaatgtactcttgttaattgctttcgttaatgatagacagttgtttaataatatcgtaacactattgtcaaactattctaacttttataattaagaacctatacaaaaacgtgttctcggataaacttgtttttacaaaccacaaaaagctctaaacattagtgtaaaccaatgcttagagcttttaattactttatgctttaaaagataatgtgttatctacgatgaccttaccgtctttaataactttttctgcgtgattgataccaaaatgataaggaatatattcatgatttggtgcatcccaaattactaaattagccttatcacctgtgttaattgtacccgcgttaatgtctattgctttagcagcattgaccgtaacagcattccaaacttcattaggtgatagctttaatttcaacgctgcaatcgccataacaagttgtaagttgtttgtgacactactaccagggttataatcagttgctaatgcaatcgcaccgttattgtctagcatgcctcttgcatctgcataatcttctttacctaaatagaacgtcgttgcaggtaagaggacagctacagtatcactatttcgcaacttttcttttcctttatcactagaagctactaagtggtctgctgatattgcttgttcatcaattgctaattccagtccgcctaacggatcaatttcatccgcatgtattttcactttaaaacctgcttctttggctttttgcatataatgttgcgattgttctattgtaaatacacctgtttcacagaaaatatccgcaaaatctgcatattgttttacttccggaagtaacgcaatcatttcttctaaaaatgcctcatttgaacttgcctctttaggtacagcatgaggccctaggaaagtatgtttcatgtctaaatcatatttctcagctaaacgattagacactttcaattgcttcagttcattttctctatctaaaccataaccactcttactttcaactgcaagcacgccgtgtttaatcatagtaagcaaatcatgctctgcttttttaaacaagtcatcttcggatgtttctctagtagcattaacggtagataatatgccaccacccatttctaatatttcaaggtaagacttaccttgacgttttaatgacatctcatgttctcgagatccaccaaatgttaaatgggtatgagcatctactaatgccggagaaactacttttccactagcatcaatcgtctcagtcgcatcgtagtcatctgtatgttgtccagcatatacaattttgccatctttaatgacaactgtaccatttttcacaacatttaattcatctaattccttacccttcaaaggtttatctgttgatctcggtaaaattaattctgctatatgattaattattaaatcattcattacttatcacctgctttatcaatcattggaatatgaatacctttttctttagctgtttgaatagcgatgtcatagccagcatcaacatgacgggcaacacccatacctgaatcagtagtcaatacgcgttccaatcttctttcagcacgctctgatccatctgctacaacaaccatacccgcatgaagtgaatatcccatgccaacaccgccaccgtgatggaatgaaatccatgaaccacctgcagctgtgttaatgagtgcattcaatacagcccaatcaccaaccgcgtcactaccatctttcatactttctgtttcacggttaggactagcaactgaaccagcatctaaatggtctcgtccaataacaattggtgctgaaatttcaccgtcacgtacaagacgatttaaagctaagcccattttcgctctttctccatagcctaaccaagcaatacgtgatggtagtccttgatatgaaattttttcttcagctaaatcaagccatcttaataacttttcattttctgggaaaagtttgcgcatttcttcatccgcacgttcgatatcttttggatcaccactcaacgcagcaaagcggaatggccctttaccttcacagaataatggtctaatgtaagctggtacaaagcctgggaagtcaaaagcatttttcactccgttattgaaggctacttgacgaatattgttaccataatcaaatgctacagcgccacgtttttggaattcaagcattaattcaacatgctttgccattgaagcctgtgacagttcaacatattttttcggatctttttcacgcaatactttcgcttcttctacagagtatccttgtggcacatatccatttagcggatcatgtgcacttgtttggtcagtaataatgtcaattttaaatcctttttctagaatagcttgatggatgtctacagcatttccaactaacccgattgataatccttctccacgttctttcgcctcttctgctaattttaatgcttcatctaaatcagctgttttaacatcacagtatttcgtatcaattcgcttatcaacacgtgtttcatcaatatccacgcaaattgctaccccatgattcatagtaattgctaacgattgcgcaccacccataccacctaaacctgctgtcagtgtaacagtgcctgctaaatctccattaaagtgttgattacctagctcagcaaatgtctcataagtaccttgcacaataccttgagaaccaatatatatccaactaccggctgtcatctgtccatacatgattaaaccttttttatctaattcattaaaatgatcccagtttgcccattcaggcactaatactgagtttgaaattaatacacgtggcgcttcttcatgtgttttaaatacagcaactggctttcctgattgtactaacattgtctcatctgattctaattcgcgtaacgttttctctattgcttcaaaagcttcccaattacgagctgcttttccaataccaccataaacaactaaatcttctggtctttcagcaacttctgggtctaaattgttgtataacattctaagtactgcttcttgttcccaacctttacactcaatactcaaacctttttttgcttgaatttttctcataaaattcgctcctgttctttttagaagttaattccactaaatttaaaacgcttacattattatcttcaatattcattatagtatgttaaaatatagccaacaaatataaataaactaattatccatagcttgaatctataaataaaaggagcaaaaaacatgaaaattattcagttagaatacttcttggctatcgtgaaatataatagttttactaaagctgcacaatttttacatattagccagccatctttaactgctacgattaaaaaaatggaagcagatttaggttatgacttatttacacgttcaacaaaagacatcaagattaccgaaaaaggaatacagttttatcgttatgcgagcgaattagttcaacaatatcgatccacgatggaaaaaatgtatgatttaagcgttacatcagaaccaaggataaaaattgggactcttgaatctacgaatcaatggattgcgaatttaattcgaaaacaccattccgactaccctgaacagcaatatcgtttatatgaaatacatgacaaacatcaatctatagagcaattactgaattttaatattcatttagctataacaaatgaaaaaataacccacgaagatataagatccattcctttatatgaggaatcttacattttattagcacccaaagaaacatttaaaaatcaaaattgggtagatgttgaaaatttgccactcatattgccaaacaaaaattctcaagtgcgcaaacacttagatgactattttaatagaagaaatattcgtccaaatgtcgttgtagaaacagatcgattcgaatcagcagttggatttgttcatcttggcttaggttacgctatcattccgagattttattaccaatcatttcacacgtccaatttagaatataaaaaaattcgtccaaacttaggccgaaaaatttatatcaattatcataaaaagcgtaaacactccgaacaagtacatacattcgtacaacaatgccaagattatttatatggacttttagaggctctttaacttaagttattagagcctcttatgcagttgcccagtcaactgtataccttttgcatttaacttaagttattagagcctcttatgcagttgcgtagtcaactgtataccttttgcatttaacttaagttattagagcctcttatgcagttgcccagtcaactgtataccttttgcctttaacttaagttattagaacctcttatgcagttgcgtagtcaactgtataccttttgcatttaacttaagttattagagcctcttatgcagttgcgtagtcaactgtataagaatttcataaccaattttatgatttccatgtataaatcattacattcagaccagcaaacataaataagcagtaagatgactacaacttaagagtcttcttactgcaattatctttcaaatatatcaacgttaatataacttctattacgaaatactcacattctgccctgcaatgcaaatttcgtcacatataaatatttttaattattttaaaaaatgatgcactaaattagcaacgagcttcgcagttctattgtcagcgtcatatgttggattcatctcagcaatactaactgaagacaccttatcacttggaataatacgttttgccaattcaagaacagtatgtggatacaaacctaacactgccggcgcacttaccccaggcgcaaatgcactatcaatgacatccatacaaatcgtaaacataatgacatcatgttcatgtataaaacgctcaatcatatctttaattgttggtgatacgtgactcaataattcatctgcaaagacataatcaatctttttctctttcgcataatcaaataaactttgcgtattcccaccttgagcaataccaagcactaaataacctgtgttttcatcttcttctaaaatttgtctaaagctcgttccagatgtagattgttgttcagcacgtgtatcaaaatgcgcatcaatatttatcacaccaatagattgtgttggatagactttacgtgttgctaaatattgagcatacgcaatatcatgtccaccacctaataaaaacgtttgtctatgattaacaattgacttcgctgcaagtgttgcaaattctttttgagtatcaattaattcctcatgatcatgataaacatttccgtaatcgactaaagtttcacattgattcaaatccggcaaacctgcaaatgcttgtttaatcgcatctggcccttcttttgcaccaatgcgccccttgtttaaagcaacacctttgtcaacagcatagcctaatataccaacccctgatggtgtactagttttttccaatttcgacaaatcttcaaatgtcactgtttgaaaatgcctgaattttttcgggtctgtttcactatctaaccttccagtccataaatttggttcaccttgcttgtacacagcatttccccctcttatttatgtggctttttaacaattaaagtataacgtactacaaattttgaattcaattcataattaaaaagtacttatctatataccttttacccctattttctattcactaacgaacacgaaagcgatttatgttaataaaatacgtcaagactattacattttcattaatattagcacagacaatttaactcacggcttgtaatatgtataattgttacaaaatgatattttgcttgttacctaatggaggttacatataatgaaaaaaaataaaatttctggttttcaatgggcaatgacgatcttcgtctttttcgttattacaatggcgttatccattatgcttagagatttccagtctgtcattggtgtcaaacactttatatttgaagttacagatctagcaccattaattgctgcaatcatttgtatactcgttttcaaatataaaaaggtccaacttgcaggtttaaaattctcaatcagcctgaaagtaattgaacgtctactgctagctttaattttacctttaattattctaattattggtatgtacagctttaatacatttgcagatagctttattttattacaatcaacaggcttatcagtacctattacacatattctgattggacatattctaatggcgttcgtagtagaattcggattccgttcatacttacaaaatattgttgaaacgaaaatgaatacgttctttgcaagcatagttgttggtttaatgtactctgttttctcagcaaatacaacttacggtacagaatttgcagcttataatttcctttacacattctcattctcaatgattctaggtgagttaattagagctacaaaaggacgtacgatctacatcgcaacaacattccatgcttcaatgacatttggccttattttcttatttagcgaagaaatcggcgatttattttcaattaaggtcattgctatttcaacagcaattgtagcggttggctatattggtttaagcttaattattcgaggtattgcttatttaacaactagacgaaaccttgaagaacttgagcctaataattatttagaccatgtcaatgacgatgaagaaactaatcatactgaggctgaaaaatcttcttcaaatattaaagatgttgaaaaaacaggtgtagctactgcatcaacggtcggtattgctaaaaatgatactgaaaatacattggctgacgaaccaagcattcatgaaggtactgaaaaaacagaatctcaacatcacatagataatctaactgaatctaatcatgatgaagatcatgacatcacttcggagtcagtagaatcagcagaatcagttaaacatgcaccacaaagtgacgatttaacaaacgattcaaatgaagatgaaacagagcaatcattaaaagaacctgcgacttataaagaagacagacgttcatcagttgtaatcgatgcagaaaaacatatcgaaaaaactgaagaacaatcttcagataaaaacaaataataacaaagcgcttgctagcacctcttaagaagatgatgctagcaagcgcttttctatactatatattatttttctaaaattttaacaccctcttgagtgcctacaataacttgatctgccatatctaagaagtatcctgtctcaaacacacctgtcagatgaattaaatactcatggaacttatatgggtcaattccttttggtaacttacaatctaaaatataattgccattatcagttataaatgcgacatcttcgtttacacggcgttctacttttatatcagcgtatgattcaattttacgtaatatgtgataccagttaaatttatccacctctactggtaacttaaacgtctcacctaagtattgaaccattttcgtttcatcgacaaccacaacaaaacgcgatgccatttcatctatcactttctctctgaacagcgcaccaccgccacctttaattatatttaaagatggatctacttcatcagcaccatcaattgctaagtcgatatgatcaacatcattgatttcgcatattttaatacctagttcttttgctaaaaatgcaattttattagaagtgcatacacctgtaatattgtaaccacgttctttaattagttgcgccatttgaggtaagagtaattccattgtacttcctgtaccaattcccagcgtcatgtcaccattgatttgacttaaaacatcatttaatgtcattaacttaagtgctttgacatctttcatgaaggtagcctcccatatttatgtaatctattcaattcatattttacatgactcgtataaattaacatacccttatttctaacatttttttaaacatatcaatcagaatttacaattctaaaaatgttttatagtacaatatactttaacttaacgttaaggagaatgatatgatatcaattcacgcaatttcgataggaaaaatccaagatttgccttatagctcgaaaagaccgatgcgctctgctttagataaaactaagatttcacaaacaacatggttatcttcaactggtttcactggtgatgaacaggcttataaagatcatggtggaccacataaagcagtttgtgggtttagtaaacataactatgcactgtatcaagatgatttaccttcactacctactcatgcgatgtttggagagaatttaacatttgattatttagacgaatctgatgtttactttggtaatcaatatcgtttaggtgaagcgttaattgaggtttctgaaattagagaaccatgctggaaaattcaagcaaaatataatattcctgatttagtgaggcgcatgtctacatctggtaaaacaggtttctacttccgggtattaaaacaaggctatgtatctccaaatgatcagctttacttaatacaagaagcaccaattgaacatcgtttatctgtacaacagcttaatgacctttattataatgatagacaaaatcaagatatgttacgatatgcactaaacaatccatttctgtcgccaacaagacgcgataaacttcaaaaaatgtataacaaaacattgaaataattacctttcattataagtgttaaatgaacttttcaaaacaaaaaggaatcaacttacacatcgtttgtataatagccttatctataactactgatgctattgattccttttttatgttatatattttctttatttcaaactgtatattaatgatgtcatttcatttgatacgattcttgataacctattcaaaattccgccaaataacataaatataatataaatgccgatacttttattcattttctactttttcttcgatacggaaacttgttttcgaattgaacacttcaccagcttttaaaattgacggtgctttttcaccatacaaattaatatcatttggtaaaaattgtgtttctaatgtaaagccagaatgtggtttataaatattaaatggactatcccactcatcaggctgattaaaagtaaagaatacaacatgaggcatatctgtatcgacctctaacataaattcatgattttcaacatacattttatgttcaccaactgtaaatgggtgatctagaccaccaaaacgtgtcatttgttggcttaattgcgcatgttgtgatgtaaaaatatcactcaattttatcttgttatcttcaaacacttcatgtaaatctagaatatcacctgtaacaatatttcgctcatctaatacatacatatctaattgattacttgaaatgcgatgattatcaacgacattattatctcgattcaaattgaagtacacatgattcgtaggactaaacaatgtgtcctctgatgcaactgcttcgtattcaatcgaccattggtgatccgcatcataaatatgtgtaatcgtcaaatcgatatcacccgggaaatgatcatcagctgatttcaacaccgtcttaaatatcactttaatttgagcaatttcatttctaatttcataatcaaataacttattgtccaaaccatgacatccaccatgtaaatgatgttcgccgttgtttttttctaactgatattctttacctttcaacttaaatttagcattatcaattctaccgctatatcttcctatagaagcaccaaatttaaaaggattactatgataaaattcatccgcttcaacaacatttccaagaacaatattattatcatgatatttccaagacactactcttgctccataattcgtaaaaataattttagtttcatcattatcaattttgattaaatctacaccttgtctttggtgttcaacttcaactatcatttttacttctcccttctaaccacaagtgttcaagctctgctgggtagcaacattactaaaacacctacaatacaaatgattgcaccgataacatcatatttatctggcatttgtttatctacgaccatcgcaaaaatcaaactcatgatgataaatacgccaccatatgcagcatatactcttccgaatgatggaaatgattgaaatgtcgcaatgacaccatataacatgagtatcgcaccgcctattagcccaacaagtgaagactgcccttccctaagccacagccaaatcaggtatcccccacctatttcacataagccagctaatataaatataaaaatcggatataacatgaaatcactccatcacacatttgctaccaataatctatcgtctacatatcatttgtttacatttcttcttacttcacattcccattttaaaaagttcgttttcacattcatattgtacacttttttagacattattctatagctaaatataaaaaaataagagtaacacgctttcatcatcattttatatgataaatgtgtgtcactctcatcaattttattttttaaatacacgtttcattgaattaaataagccacgttcaaatgtaagtactgaatctttatatgttttaattgcaatccatatcaagacagctaccattacaattgagattaatgaacttaagatgacctcatgtatttgaagccctgaagtttgagcgcgtacaactaattgaaatggcgctaaaaacggaatataacttgtgattaaagcaagtcgcccatctggattatttatcgtgaatatcgcgatataaaatgcaatcataccaagtaatgtcagtggcatcaaagattgatttaaatcttctattctagatgttaatgatccgagaatggctgcaagtaatacatacgccataattccaacaatactacttataattccgacaataataatttgccaagacaattgattcatttccacgttaaaaccttgtagcaagtcttttaagtcaaaggcaaaaatgcatataactgccatcaatacaattaaaataatctgagtcacggcaactgctataacgcctaaaattttagcaaaaatatgttggattggtgaaatacttgtaataatcatttcaatgacacgcgatgttttctcactagcaatttccatagctatttgagatgcataatttaaaacaataaagaacattagaaagataatgccataagctaaagcatagttaaaaatcttttgtccttctgatactttatcgacttcatcattagaaatcaccttattatcaactttactttgtgcttgtaatttttgtaagtcttctttgttgatatttaattccccggctaccatatttgtttgaatagctgtaagcaatgcttgtactttttgtgaatcttcatgacttactcgcttctcactaatgattgtcccttgtaacgtgcgattttgattcaacttgataatataagctttatcaagtttatgtttttttacttctttttcagcatcttctatagaaactttagtaaacttagcatcactatgaaatgtatttgcctgttgcttgaaaaccttatagatttgttcattcggtgctgctacaccaattttatctggaccatcatcaaacatgttaataatcttatcaatgttagataggccaatcattaaggcagcaataataatcataaaaattacaaatgatttagctttaatttttttgatatatgtcaaagtaaatgtcgcccaaaacttatgcatccttgccaccaaccttctcaatgaatatatcttgtaatgatggttctacaacttggaaacgtttaacataaccttgatgtgccacaacttgataaatatctttggctacgtcttcattctcaatcgtcaactgaagaccttgcttcatgttttcactatgaatgatgcctctaatgtttgttaaatctggtagtgttgtttctgattcaatgacaactttcttgttaccattagatgcacgtacatgattgatatcaccagaaacaacaagttgacctttatctaaaatacaaacatcatcacataattcttcaacatgctccatacggtgagaactataaacgattgtactgccccaatcatttaagtctttaactgcttcttttaataactcaacattaactgggtctagaccactgaaaggctcatctaatattagtaattctggtttatgtaacatacttgctaacagctgaattttttgttgattcccttttgatagactatcaattcgttttttgcggttttcagtaatatcaaaacgctcaagccaatacgatatttgctgttgtatttctatttttgacattccctttaaagttgccaaatacttcaattcttcttcaactgtcaatttcccatgtaaaccgcgttcttccggtaaataaccaatacgattgtacattgttttatctagttttttaccgttatacgtaatgtgtccttcagttggttcacttaagcctaaaatcatacgaaatgtcgttgttttacctgcaccatttcttcctagaaaacctaacattttgcctgattctaactctaatgacatatcatttactgccgtcatcttgccaaaacgtttcgtaacatgttcaattacaagtcccatacttcgcctcctaaaacaatatgtatttatcttaatataacatttctattctctataaatgcaatatttttaaagtgaatttatttttaaaatttctgaaattgaaatatttaaatagtatcttctttgcatgttaagtatgattagtgttagatacgcattttccatgcctttattgccttattggtaaaaaaatatcccagcatcattgtgccgagatatttatatccttacaattgattatctgtttcttccggtgttttcggtgtttcagatgtacccgctttttccggtgtttcagatgtcactggttgatttttaattgaagatgggtattttgggctttcgccatatttatttgccggcttactgtcaaagcataggaatactatcataacaattgttaggcctaaataaacaaaataaagaagtactaacaaaatattaagacccatcggcattaaggtaaaatcactgtcataataactatcgataatctgtaatactatataaaatataatactgaatactgtcataatcattggaaataacattgttcttgatatatcgtgaaatcttcgaacgcacaacgctaaatttggaataaacgttgccaaactatagacaaaagtatacacagatgtaaggataatcatcaatatactcataactattaatgcttcgttatctgccgctatagaaataaagaatagaaataggtttattattagcacacacacagctggaaccataagtatcaaatgccatagtgccatataccaatattcactacgtcttgatctccccttaaaattaacataatttttccaaaataatacgaatgatttcataaaacctacttgaggtaattgttccattgtaatctccctttcatttatcatatttatatttttaattattattaccgttataatttacaagattcattatcaagccacttcatttcaatcgtcattcactttggaaaatgaattttatatttcatcactagtaaaatgaaaacccgctacaagtacgcatctatatagagactcatttgaaagtcaacgcttcgttaactatactaaaaatatgtcacactgtaatgttcacgttaagaagagtctcaatctatgcaaataaaatattccataacaaagtatatactttacatttttataattcttaacaatactattttaacaaacatttaccacaataaaaatatctttttcatttttatttaaattaatcatataattacgaggagaatattatggatttcgttaataatgatacaagacaaattgctaaaaacttattaggtgtcaaagtgatttaccaggataccactcaaacgtatacaggctacatcgtggaaacggaagcatacttaggtttgaatgatcgtgcggctcatggctatggtggtaaaataacacctaaagttacgtcattatataaacgtggtggtacaatttatgcacatgtcatgcatacgcatttactcattaattttgtaacaaaatctgaaggtatacctgaaggcgtacttatccgcgcaattgaaccagaagacggtttatccgctatgttccgtaacagaggtaagaaaggctacgaggtaacgaatggcccaggaaaatggactaaggcatttaacattccacgagctatcgatggcgcaacgttaaatgactgtagattgtctattgatactaagaatcgtaaatatcctaaagatattattgctagtccacgaatcggtattccaaataaaggtgattggacacataaatctttacgttacacagtgaaaggtaatccatttgtgtctcgcatgcgtaaatcagattgtatgtttcccgaagatacttggaaataaatgccatctttcattgattactatcatgaaaatgaaatctatctccttataagtcaatcaatcgtgccgtcaacatgcggatgggttgattgtttttctttgtgtccatcatattttttgattcatctcctcttattgaacctgttcttaattataaaatataacaatagaattatttataattattaaatttagatgcattaatattattgatattattttcaaaaactagaaatattgatttattgcatgtataatgttaaaagtgcccttttataacgcttacatatgaaagcttatttagggagagggatattcaacaagggggatttgaaaatgatagaacttaatgcaattacaacattatgtttagcctgtatactttacttacttggtaaagctatcgttaatcacgttaattttttaaaacgcatttgtataccagcaccagtgattggtggcttaatctttgctattttagttgcggctttggattcatttggcatggttaagattaaactagatgcttcattcattcaagatttcttcatgttagcattctttacgacaatcggtcttggtgcatcattgaaattatttaaattaggtggcaaagtcttgttattatactttatgttttgtgctatcatttcaatcattcaaaacatagttggtgtatcactagcaaaagtattaaatattaaaccgttactaggattaacagcaggttccatgtctatggaaggtggtcacggtaatgctgccgcttatggtaagacaatccaagatttaggcattgactcagcattgacagcggctcttgcggctgcaactttaggtcttgtatttggagggcttatcggtggaccagttgtaaaatttttaatcaaacgttataacttaaagcctcaacatagtgacgatacatttaaagattatagccaagtagcatataacgaacatttacatagtaaatttaatgccactgaagtattcttcattcaatttacaatcgttgtattctgtatggcagttggaagttatttcagtcatttgtttacagctcaaacagggattaatgttccaatttacgttggttcattatttgtagctgttattgtccgaaatatctccgaaagttttaattttaatattgtagatttaaaaattactaatcaaattggcgatgtcgcattaggtattttcttatctcttgcgctaatgagcattcaattaatcgaaatttataaacttgctatacctcttattattatcgttttagttcaagttgtcgttatgattttatttgctgttttaattttatttagaggtttaggaaaagattatgatgctgcagtaatggtaggtggttttatcgggcatggtcttggtgcaacgccaaatgccatggcaaatttagatgttattactaaaaaatatggaaactcacctaaagcatatttagttgtacctattgttggtgcattcttaatcgatttaattggtgttatagtcattatgggattcattcaatggtttagttaaacaccaaactcataaataaaagaggaggccttcgcctcctcttttatttatcctcgatgtatattcaagctacgttgttctatccatgacaatatttccggactaaatacgatttgtttttgtgttaagtcgtcaatatttttagcatctaacatcgtcattattgatttcatgtgttcaataaatgattctacataagctactgtatgtgcaatgccattattttcaacttgatttaaaaacggacgtgacataccagttgcctttgcaccaagtgctaaacttttaattgcatcgagtggtgtacgtaaaccaccactcgcgaaaactgaaatttcgctttgataagccgttgtttcaagtaatgactcaactgtagactgtccccatgatgataagtaatccatatctttatttgcacgacgttcattttcaatatctacaaagttagtaccacctttgccactaacatcgacatacttaacgcctatttgttgtaagtcatgcattaattctttgctcataccaaatccaacttcttttataatgactggaacagatactcgtgatacaatcgacgctatattatctaaccaagtcacaaattcacgattcccttcaggcataactaattcttgaggagaattaacatggatttgtaacgcttgtgcctcaagtaattcaactgcttccaaagccttttctactggtacgtccgcaccaacattgctaaaaatcatgccttcaggattcatttttcgcgcaatcgtaaatgtctcagccatgcgtggatttctcaatgctgcatgtgttgatccaactgccatcgctaagccagtttctcttgcaactacagctagcttttcattgatgtttttcgtccactcgctaccacccgtcattgcattaatataaaccggatatgtcatcgttaagtcaggtgtctgtgatgtcaaatcgatatcatttacattaattgatgggatagaatgatgcacaaaacgcatcttatcaaaatctgaatgcattgcgtcagattgggccattgctatttcaacatgttcattttttctctgttctctttgaaaatcactcatgattaaacctaccttttcgtcatttctaatttaaaaccattttttacgtctgaaaaagatgattaatacgacagctataacaaacattacagctaagcaaatataatatccataatgtaaatgtaatgccggcatatttacaaagttcataccataaatcccagctatgaatgttaacggtgaaaatataactgatactaatgttaatacttgcataatactattcattctaaatgacgtgtatgactcaaaattttctcgtatttcatttgtcatttcttgtgcagtacgaatgatattacgttgcttaatcaagtggtcatcgatatgttgaatgtatagcgaatgtttattatctataatcaaatcaccattttgtttcattgtatcaattagctcctgcataggaaacagtacacgttttactttaatcaaatccgaacgtaacttaaagacactatccatgaccattttattaaagcgatcatctacatggcggtcttcaaaatgataaacactatcttcaagtgcatatacaaagttgaaatatttatcaaccatcatatctaaaattaatatgacgacatctgcacaatctaattctgcatctaatgtattcatatacttatagactactttatttaatgattccaacgtttgatgatgatatgttactaatacattgtcttgtataaaaatatttagtgctattggtgaatagtttgaccccataatactatggaatactaagtattgataatctttataagatttatatttagctcgtggcataccgttaattgcatcatccacttctaaatcattaaaactaaaatgtgctttaaaccattcattttcttgttcattcggttcatcaaaatcataccaaacaatagtcgcatcttttggtatctctttaatatcatcaactactttaaacggttcgtatgtagtttgataccgtatcgttaaagccatcgatactccccctaaataacgaattctctattattttatcatgaattaaataacgtgtatgtcttaatttattttagtatgatagtcactaaggagatggttattatcacacaactttttacacatactcaaaccgtaacatctgaattcatcgaccataacaatcatatgcatgatgcaaattataatatcatttttagtgacgtcgtgaatcgttttaattacaaccacggtctttctttaaaagaacgcgaaaatttagcatatacgctatttacactagaagaacatacgacatacctctcagaattgtctcttggcgatgtatttactgttacattatatatttatgactacgattataagcgattgcatttatttttaacattaactaaagaagatggtacactagcatcaacaaatgaagttatgatgatgggaattaatcagcacacacgtcgttctgatgcttttcctgaatcattttcaacacaaatagcacactattataaaaatcaaccaactatcacttggcctgaacaattaggacataaaatagcaattccacacaaaggagcattaaaatgacagatgcattacaacaaaagattcatatcgaattactagatttattagatgatgttaagtttgaattaacagaattaaatgcacaaaaagggttatacattaacggaccagcaaatcagttacttaagcgtggcgtgcatatggcttatgttcaaggacaaaagcaagctatcgataatattatgactattgtggaacaacagcttgaagatcaacatttcctagaacattatgataaatttcaaaatgaagttgctcatcgcaattatgataaaacagctaactttgcagaacttagtgatattccacgtcaattcgataattttttagatcaattttatcaaattaaagggcaatactttatcatcacacatatcaatacacttattggtgattttcactcagaagctcattaacaattagtctatataatccttgctatattttcaaaaacaaaacccagttgcgttttcatgttaaatatcatcttccatgaaatcgtaactgggtcaattgtacgttattagttattttgtgttacatcctcatctatcgatttggcaatttgtttaatagctttatgtgattgtctaattggataaattggaaaatcatgtaccatcttaggataatcataaaactcaatgtattgatgatgttgcaacatcatttgttcgaacaacttcatatcaggatgtgtcatttcacgtccaccaccaaacatataaactggtggcaatccttctattgtgccattaattggcgatatgcgcttatctgttaatggtaggccattcgcccattttttcataatctcattgacaccaaactgacttagaaccgcatcttgttcgattaaagcgtccgaaatatctttattagatagtgttgcatctaaaattggtgatattaaatacaatttattcggtaatggctgttgattgtctaaaagaaattgtacaaaggataatgccagtgcaccacctgaaccatcacccatgactacgacattttgatggcctacttcagatactaattgatcataaacacgttgtatcactttgaaagtgtcgtcaatatgaaactctggtgtctttggatagataggcagtacaacctcatataatgtacttaaagtgattttatccaacaatctccaatggaacggtgatggttgtagtgcattgaatccaccgtgaatatataaaattttcttatcaatttgatgtctgaaattaaagcgaaagacttgcatatcatctaatgataatttttctaaatttgctttaacatttaatgttgaaggctgcttatgtttttttctattttcaatttctcttttataaaaaaatctttcaacatcttgatcatttttaaacataatcgagcgattgtgaagcaaatatttattgacaacgctattcataacacggtttctaatcaatgtcttaacctacctttatatattttatgtatccaatgattgtctatcccctacattctttgccaaaaaaagtatataatgtagaagatattttctttttcactttcaaatttaagactacaattgaacagtgatttttcatcattataacagacaactagacatattgataagtaaagaaaagaactttatacggaggtgccttgtatgacaaatccaaatcaacgattagaaccatttgatgagacatttcaacaaccgaatattcatcgtggtaagcgatatggtaagaaaaaacgttcattggtaagcatgattattcaaatcattgttgttatattaaccgcaatcgctggatacagcatgtggaaacaacccatttttaatattgtcttcaccaaagaatctgtaaattttgatggcattaaaaattttaacgagacaattggaaaaatgcatcaattaaatattaatttaggtaatatcaatgatttacaacaaggaatcgatcgcttaattttagtctttaacggtttctttattttatgtatcgttagcctagtcataacaatactgacaattgtatttaatcgcacagttctaaaagtagtaaatattttagtgttaacaattatgttagtcattacattgtatttcagttatattattaaagcactcgcacaagaaattgcagatgctttaaaaaaatattatttaaatgtaccaccagatcaagtgattacagaagctgacgctattcataacggcatcattttactgggctgtagcattggtttacttgttataagcttattcttccgtaatcgcatgcctcgattaaaataatgttatatagtagggattgggacagaaatgttattttcacaaaattcatttcgttgacccacttcctgctttttctttattaatgacctactacatcaatgccaaattttaatataatttctctaacattctacaaatcaacaaataaaaaaagtatcgataaccatatattggcaccgatactttaaaaatcatgtccccacaacataatttttgattagtcacacttcaattaatttatttaatttattcatgattgatactattatctgcatctatcttttgagccgtagcttttgcttttttgttgctttgtaaaaataagcataaaatcaaggcgatgacgctaaatatcgttgcaactataaatgcatcattaatcccttcaactgttgctagtttatttacaaattgtaataacactttcattgcgccttcttgaccaccatattgcgatgctaattcacgcatatgatcttgtacaacaggattcgttttatctaactcttccccaaaagctgataaatgttgtgtagtttgcgttgtcattacagtaactaagattgctgttcctatagaaccagctagttgacgcatcgtatttaagaaggcattaccatgggatgccagtcgtcccggcaacgcattaatagctgctgttaccattggcatcataataaatgccataccaaatgaacgtagtacatagatgcccatgattgtcatatatggcgtatccatattcaatttagttaattcccatgttgcataagtcatgacagcaataccaaaaatggctaaaggttttaaaccaatcgtgtctaacaacttaccagcaaatggtcctagtagacccataattagagaaccaggtaataataacaatccagaatctaatgctgagaaaccacgtaaattttgtaagtaaattggtaataaaatcataccaccatacaagctcaacattacaaccatattaattactgttgttagtgtaaatgttggaaatttcaatacttctaaattcaacattggcgccttcattcttaattctcttattacaaatagaataataaagataataccaatcgcaaacattgtttctatctcaacagaaccccagcctttgttacccgcttctgaaaagccgtataacaaagcaccaaaaccaatcgtactaaaaatgatgcctgggatatcagctttagggtttgttgtatattgatataacttaaaccatacaaaaccaactaagattgcaataattccgataatgaacataccgtaaaacatcacattccaatggtaattttggacaatataacctgataatgttggaccgattgcaggtgctaaaatcattgcgatacccattgtacccatggcagcaccacgtttttcaggtggataaattgtaataataacaattgaacctaatggcattagtacacctgcaccaatggcttgtaatacacgtccaaccatcatgattgggaaattcattgaaatcgcacatattaatgaaccaattgtaaagagtactaacgcaactaaaaataattttcgatatgaatatttattaaatagatacgccgtaattggtattaaaataccgtttactaacatgaatcccgtcatcaaccattgccctgttgacgcagaaatattaaattccgtattaatttttggcaaagcaacatttaataatgtttggtttaaaatcgcaataaacataccgaataataatgccgctaatattttaccgcgtgaaacaccttcaccaaaaataaagtttttatgttcttttttaattttctcatttactttatattcttctgagttaggatttttagcagcaaatgcttcatcatccttattatcattgaataattcttgatcttgttcagacccctctgtctgtttgtttagactaacttgattctgattgtctttattgtcaatacgtgcctcttcacgcgccgtatgttgtgacgattgatcagttgttctgtctaaatcacttgctttaaatttagattgatttgattgacgtgtcgcaaactgttgttccttttgttggcgtttagcttttcttctagatcttattaaaaataaattgatcacaccaacaataatgagcgctaaaacaatgtagcttataatgaaggtcgtagtcatttaatgacccccttaatttttatggatttttacttcagcgttcattccaggaacaacttgtttagacggttctgaatctaacgtaattttaacaggtataacttgagatactttagtatagttaccgtcactatttgatgatggcattaatgaaaagcttgcagcagtagcttttccaatactatcaactttacctttaatagaagctttttgaccgtcaatagtcacatcaacatctttaccaacttcaacatctttaatatctttttcgtcaatatttgcagttacatataaatcatctaaattgtaagcataagcaattggattgcctgcttgtaccatagaaccttccatgccatctaatttagcaattgtacctttttgtggcattttaagttccatatctttagtttcgccatcttgaccttgaacagtaactgttgctactttatcacctttatcaagtttatcaccttgcttaacatttagtgatttgatttgcccagaagctggacttgctattttaatttgatcgccatttactttagcattatcagttgttatataacttgtcgttttattccagaaataaaaaccagcaatcccaattgctaacagtacaacaaccgtaatgacattaattaatatcatctttttcatgaaacatttcctcctatttgcttttaaaattcactttatttattatagagacatgataactaaaaaaacaccaacaatttttataagagtgttggttaaaattcacaaaggtgtaacaatatgaaacgacaagccaaaatagaaattcaaaacgcacttgttgatttgatggctgaatatccttttcaagaaatatccactaaaatgatttgcgcgtattgtaatattaatcgttctactttttatgattattacaaagataaatttgatttattggataccatcaactcaaagcataaagaaaaattccaatttcttctaagcgcgctacatcataatttcgaaaatattaaacaggataagcttaaactttataaattcttcattattattgctaagtatatcaagcgcaatgagcagtttttcaaagacattttagttacctatccaatgaaaacattattcatagactatataaatttagcgagagattactatcaacaaattatgaatgactatagtactacagtaaccaataaacagctttatgttacatatatcataggcggtcaagctggggtatttattaattggctttcgaatggttgtaatgaatcacctgaagaagttgctgacattttattggctaatacgattaaactacaaaaccaataatacggtttcattctaataaagaaatgctataaaacaactagataaagttaaacccaatggatagatattagtacatatgtaacggtgctatcaatataaaaatgcgcttgggacattaagctcatatgcatataagatgatttttaacatcatttttggatgataggatgttgcgccacgatgatgtcagaattcatctaattcgctatcaggtatcgtttcaacaatttcattaacatatcgcgaaatatcattttgaggaattctaacagaagtttctattggtagtgtaagttgggtcatattatgatttttatacataaggcacctcgttaatttagtttagtggtatttattaaattatacgaagggacccaacacagaaaattcattttattaaattttacatttatgtgcaagttgggcaaagtgtcttatttttttaaagtatttaaaagtaaaattacatgttaatacgtagtattaatggcgagactcctgagggagcagtgccagtcgaagaccgaggctgagacggcaccctaggaaagcgaagccattcaatacgaagtattgtataaatagagaacagcagtaagatattttctaattgaaaattatcttactgctgtttttttagggatttatgtcccagcctcatttttatttttgatgctaaattcataggtctatgaatagctcaagttttgtttttaaatttttcaattcattataatagaagaaactatgtttatcatcgatttgttttaaataccttcatattataaatctgtaaaataattaatataactgctgtagctataataataattatgtaaggtataggattatcttcaccttttacccccactaatggcgatgcaataccaccaaataaaaactgcactaaacctaataaacttgatgaactccctctaccactactactttcatccatagctattgtaaaaccaagtgtcgcaacacctgttactggtgctattaaaatgataaatcctatcgctaaaatccaaaagttccaatgattaagcaatacaatcgtcactaaaattacaccgataatctgaatcatcgtcatgcctctcatcaatttttgtgagtctataaaatcaacaaggtacccagtaagttgacttgatataatgagcgtaataccaattcctgcaaacatccaactaaattgtattgcagtcatgccataaattttttgaataataaacggagacgcagaaatataagtaaataatattacaaatgtcataccttgaatgagcattggtaatacaaaacgtggcgtcttcaataatattttgaagtttttaaacattgtctttaatccactacttgactcacgatttgtcactgttaatgattcaggtacttttaataaagaacctatgaccatgacgaagccaaagatagtcagaatgacaaagaccatacgccagacagaataatttaaaattatgccccctattgttggcgcaacaactggtgcaataccattaacaagcatcaataatgccataaacttagttagttcattaccactatacatatcacttgctatagctcttgaaataactgctgctgctccacctgtcactccttgaagaaatcttaatgcaaccatcagccaaatattatgtacaaaaacaatacctaaacttgctaatgtaaaaataatcatagctataataagcggctttctgcgcccagttgaatctgaaattggaccagcaaacaaattaccgaacgctaaaccaatcataaacatcgataatgttaattgtgcgttagacgtcgttgtttgaaaatcatgtctaatatctggtaatccaggcaaaaacatatctattgataatgctccaatggcagtcaaagatcctaaaataataataaatatcggtgaacgcttgttaaaatgcgttaaatcattcatatgactatctcctttatattatgattagtttataactatcacgaacagaaactaattttaaatatgctcttttatatattagcattactcacaagtttcatgaacatcattacaacttataaaaggtataaaatgatataaacctcagcactccataattttttcacaaaaaacaatcccttcaaagtaattcacactaattgtaaatactttgaaaggatgttgtttgtattccatgacacatgcatcttatttaagttttatactctatttttctgatgtcttgattaattgcaagcggtcttgcgaaccttgttcaagctcatattctttatctacttgcttaccgttttcatttactaatcttacggttgcagtaatcttatcaccatgtttttcggcatctataatttgtggtgaactaatcatcattaaacttcctttagatacacgcttctttacatcatcataaaaagatgatcctttttttatatatgacgatacaaaatcaaaatccgactgattaaacgcagcattattcgctaaagaatatccagcaaagaattctatcaatttgttcttcaagctgttttcttctttttctttcttttcaacataatcttcgatatcttcactgtcaaaattcaaagttatctctgtattgtattttaaatcgctggctttaatcgtcttcgtctgtgttgtaaatgttttacctttcgctttacctgaagctgaaatggtaatatctttattttgtggatatggaccatacgttttggaacttgaaaatgccatttcacggtcatttatagttacttttttagaactatcatttaattttgtatcgccttttaaagttacagttatatttgcttcttcaaaatcttcagtaacatctaccgtttcagaattactttgtctaaaatcaaattttaaatggcctgcaaaatcaccgttctcagttgatttcatagctggaattctatatgtccccggtataaaattacctattggcgtcactttatttgcttcagctataaccatctttttcttaccaccagatttaaactcatattttgttttttctttcggtttaacaattggttgcttggtaggtgcagtaaagctcatattatcgaaaaagatataacgcgtgccatttttacttacacgtaatatattttgaccagatctggtttgaatataagaagctacactggtcttactcttattcaatttatgtaccgtatttttaaggtcgctgacaaattgcttaagcccaacttcatctttgatatagttaatgtatactttcgcttcttcagaatctactttattatctttagtacttaataatgttgctactttttgtttatcattattctcaatcgcattcactaatattttagtttgcgcttcaggtgaattgaagtttcttagtaaaaagaacaatataataattaagattaaaatgaaaaaaccaattgcccaaggcaccatttttctcatcttgatgttattagtttgtatatattcatcggttgactttctatataatgcttgacgactatcaaatttatgtccacattgtgtacatatctgtacatcatcttgtgcttgttgtccgcacttcgggcaagatttcatactttcacctcaattctgttcctcttcaattgttatatgtatatcataaaaattattttattattttaccattattattttacaaatattatcccaagaatacaattcaagaaatgattaactttactttagaattgtaccttattacattatttatgaaagtactctctcaattataactaaaaagaaggtgttcaatacatacatatttagtcttatatttgaacaccttcaaaaacctatttatgattgctatatgttttaatgcgatgattgatgacttctaatacttgccttacattttcaatatcttcagaatttaaatcattagtaatatcttgcgcaatatctgtcataatcgcattacgttctttcaaatatgctctacctttgtcagttaaggttatgaatttcaaacgttgatcaatatttaaatttggtttatctaacttaactaatttagcatcgattaactttttaattcgtcggcttactgcggccttatttacaccttgtctttgcgtgatttcactaattgtcaaaggttctttatttaacatacctaatacgttagactgctctaatgaaatttcatattcattttgtaaatctttcaacatttttgcagttaatgcgttaacgttatttataaactgctctaaaaattgaatatggtcttgtaaatgttttaccataattatttctccctaattactatttttataaagtatcctcagcaatcattgtatcgcacatctaaaaaacacaaaaatattgacccatataaaatataacaaattaagacttacatgttgctacgttctccttgctttaataaattaaatcatctacatttatacttaatatttattataagcgaggtgtcagtatgttattgaatttattattaatatttatacttatcgttatttgtccgttaattctcaactatactctgacgttaaatttaacatgctacatcttagttgtcatatcgatatttttgtcactcatctatagcatcatgacctatactttcccttggtctatgtttgtaacatttataataatcagtattatcatgctattcaaacatagatatttattttctcatacttctagtcgcttatttattaaaaaattattatctttttcatataaatttgtactctacacatcagcacttctatttataagtacgattcagtcacctattgtgaaaggtatgtctatgtggttagctatattatgcctttccctgatactaacctttatttgttatctcgtttggacagtatcatatagacatagatcatacaccaaagaagtcgatatcataattgtgttaggtgctggtatttttaccgaatttgtcacaccaatgcttgcagcgcgtttagaccgtgcacttgatatctatcaacaacaagcatcagcaacaaagatcattgtatctggcggacaaggaccagacgaaccaatttctgaagctttagctatgcaacgttatttgattgcacatggtgttgataaaacagatatactaatggaatctcactctataaatacatacacaaactttttatattctaaacaaatcatcaacaatttgtatcatgaagcagttaaaattgtttgtgtaacaagtcagtttcatgtattacgcgccttacgactagcccaaaaattaggtttatctatcgatggtgtcggaagccatacaccatatcactttttcttacatgtgctcattaaagattatctaggcgtaatgtatcagtatagattgttattaacgttatattgttcaagtagttggtttatatgtctatacgctgcttttatttataatagttaacccacaaataaactattattataggttgtttttaatattgcgtcaaactatctttaaatattcgttaatccttgattagacaattgttatattgaaaataaataaactaaagcacgtcatcattttatataatagtgacgtgctttttgtaaacccaaatcgtattctgttatctaacttttatactactatgtcttaaatcattaacatttagcgtctttacaagccactaatcagttattttgccatcttctaattcaatcactcgatctgcatattcaaataatcttcgatcgtgtgtaatcataataccaatcatttgttgttctttaatttgttgacgtatcatctcaacaactttcgttgctctatcggcatctaaacttgctgtgggctcatctgctaaaatgattttcggattattcataaatgctctcataatcgcaacacgttgcttttcaccgccagataactgatgcggatatacattcaagcgatcttctaaaccaatatttttcaaaagttgtgttgctctttttgaactttgttgtttggtcattcccgcttcttggcctacgagtgtcaattgctctatcacttttaaataaggaactaaatgtgaagattgaaaaataaaaccaatatcttccaatcgcaaatcactaggacgatgctgtttatcaaacaatggtgcatcattgtaaagtactgtaccactcgtttgacttaacaatccgcctaatatcgttagcaatgttgttttcccagaaccagaggcaccatttaaaatgacaaattccccttgttccacttcaaaattaataccttttaaaacttttgtttcagacaaaccttccccgaaatttttgacgatatcttcaacgactaatgccattattctgcacctccaattgcttcgataggatccactttaaataatttgatgaatgatagtgaggcacctaaaatcgctactaatataaatatccccaccatcaataaaatattttgcgttgttaagtaaaaaggcatcgttacaggcatcataaatgatagtcctactatgatgatcacagcaatacctaccccaattattgttagtgttaaaatttgtaaaactaacgcactcaataaatgtcttgtcttaataccaattgctttcaaaatgccaatttgtgatattttttgaatcgtcataacatagaaaaatgcacttaaaacgattgctgtaatagcaaacaaactcacaatcatcatatttaacggtgcttgctctgcttgataactcgcaatattatctgttaaatctttttcattcacaacttgaacgtcatttattttattaagctcatcacgttgttgttgcgttaaatttttcactggataaaatgccgtattaaccttattcaatgcattaaatccgttatcgttcaatagcacaatggaactatgcgaatacattgtgtcgtttaaaataccagaaactctataactagttgaattatttttaaaatgtaatctatctccgactctaatgttgtctgcagctaacttatcattaatagcgacctcatgagcatttttaggataatcaccttttttaagttgtaagcgttgttgtttaacgtcattcattgtaatcacatcttgttctttattagataatttcaatgtttgaacattcattttatgtgattcttgatgaattacctttttaatttgattctgttgcgtatcactaagttgcgatttctcaatttgcggctctttcattttttgaacaacatattcatcattatcaaagtgttcaaataacgaaatattctccctaccaagcccttgagctaaaccactaataaataacaccataatacttaataaaagaatgattaatgtgattaaaatataacgaaatttgtaaaacataatctcttttatcgctaatttcatatcgattcacttctccctatttcttctttagcgtcagtataaggttgaaatatgaactcaatatgaacaattgtttttttacgcaaaaatattttacatgtataataaatgaaaaagataagggagtttatagctatggtgcaatgtcttgttgtcgatgacgatcctcgaatcctaaattatatagctagccatttacaaacagagcacattgatgcatacacacaaccaagtggtgaagctgcattaaaacttttagaaaaacagcgtgtcgatattgcagtggtagatattatgatggatggtatggacggctttcaattatgtaatacattaaaaaatgattatgatataccagttattatgttaacagcacgggatgcacttagtgacaaagagcgtgcgtttataagtggtactgacgattatgtaaccaagccctttgaggttaaggaacttatttttagaattcgtgcggtattacgtcgatataatatccattcaaattcagaaatgaccattggcaacttaacgctaaaccaatcctatttggaactccaagtatctaataaaacgatgacgttaccgaacaaggaatttcaattattatttatgcttgcagcacgtcctaagcaaatctttactcgtgaacagataatagaaaaaatttggggctatgattatgaaggagatgaacgaacagttgatgttcatattaagcgactacgccaaagattaaaaaaattaaatgccacacttacaattgaaacagtaagaggacaaggctataaggtggagaatcatgtttaaaacactctatgctagaattgcgatttattccattacggttattttatttagtgcattaataagttttgtattaacaaatgtttactatcattataatttaaaagcatctaatgacgcgaaaatcatgaagacgcttaaagaagcaagacaatatgaacaatcagctaaaccaacgcacattcaacaatatttcaaacatttagggcaaatgaattaccaaataatgaccgttgatcaaaaaggtcataagacattttatggtgaaccttttagagaagatactttatcacaaaatgctattaacaacgtgttaaataataaagattaccatggtattaaagataaaccattcgcattattcgtaactggatttttcgacaatgtaacagacaatactgttggtattaactttaagacaaacgacggttcaatagcagtattcatgcgtccagatattggagaaacatttagcgagtttagaacattcttagccgtcttgttaatgttgttattatttatctcgatttcattagttatcgcatcaacctattcaatcattcgtccagtaaaaaagttaaagctagcgaccgaacgcttaattgatggtgattttgaaacacctatcaaacaaacacgcaaagatgaaattggaacattacagtatcactttaataagatgagagagtcattgggacaagttgatcaaatgaggcagcattttgtacaaaatgtatctcatgaaatcaaaacaccattaacacatattcatcatttattaagcgagttacaacaaacttctgataaaacattacgacaacaatatataaatgatatttataccattacaacgcagctgagcggattaacaactgaattgttgctcttatccgaattagataatcaccaacatttattattcgatgataagattcaagtcgatcaactcattaaagatatcattcgacatgaacaatttgctgctgatgaaaagtcgttaatcattttagctgacctagaatcaataaatttcctaggaaatcaacgtttgttacatcaagcattgagtaatttattaataaatgctattaaatatacagatgttggtggagcaattgacatcgctttgcaacatagtaacaacaacatcattttcacaataagtaatgatggttcaccaattagtccacaagctgaagcgcgtttatttgaacgtttctataaagtgagcaaacatgataatagtaatggtttaggtctcgcaattacaaaatccatcattgaattgcatcatggtacaatccaattcacacaaagtaacgagtatgtaaccacctttactattacactgccaaatcattcacattaatctctacctcctgaaaaaaatttctgtttttatttcaggaggtatcttttatattgattagtgctttctagccacttaacatttaatttctaccattcaacacattttaaatatatcgatggtcgtttatggtttaataattttgaaggaggcattaacctatgatgaaactcaatttatttatcaatgcaaatgagacggaatcttatattgatatacatgcacctaaaatgaatgatcacgttcaaagtattattaatgcagtcaatgatttagacaaatcacatacattagtcggatacatagacaaagaaatccatatcattaatgtatcagatgttataacattccaagttattaataaaaatgtaacagccattacaagcaatcaaaagttcaaactaaaattacgactttatgaactagaaaaacaattaccacaacatttcattcgcatttccaaatcagaaatcgtcaacaagtattacattaaaaaattattattagagccaaatggacttatacgtatgtatcttaaagatgcacactacacctattcttctagacgttttttaaaatctataaaggagcgcttatcaatatgaaaaatttgaaaaactcattatttattagcttaatcattggtttgtccctttcactgttctttagtatgttatttgcagacggcaaatattatccactgaacccacaatcaactattggcatattgtattatacgcatttcacagaaactaccgtaatgttgatttctattattttatggttactcataggcgtcgtctttttccttggagattttatctttaaatacacagattggggcattactaaagcaactatagtgcatttcataacaacgtatgtcggattcttacctttagcaatacttgccggttggtttccactaacaataaattacctaatcatatttacaattatctttattgtggtttacacattgatttggattattcaattctttaaaaacaagaactacgtagacactattaacgagcaactgaaacaattaaaatgatttttatgaacaactaaaaaacggtaatgtctatcacatttaaaagacattaccgtttcgtttattatttaacttgtaaatacttagttacttcttcattaattttgtgatataaatcctcatgatctgttaagcgataaccaaatgacggcaccatttctttaatctttggttcccatcctttgaattcatcacgatagcatcgctgtaaaacatcaaacataatatctacagctgttgacgcaccaggtgatgcaccaagtaatgcagctaatgtgccatcatctgacgtaatgacttcggtaccaaattgtaagttacctttagaatcctccgtatccttgattacttggacacgttgccctgctgtaatcacttcccaatcttcatttttagcatttgggaaaaagactcttaaatcatccatacgctcatcattagataacatcaattgtgacactaaatacttcgtaagactcatttctttgatacctgcagataacatcgtcacgatattatttggtttaaccgatttaattaaatccatatgtgaacctgtttttaaaaatttaggtgagaaacctgcaaatggaccaaataacaatgaacgcttgccgtctacaaaacgtgtatctaagtgtggcactgacattggtggcgcacccactgctgcttttccgtacactttagcatgatgacgatcaataacttcttgatttgtacagcgcaggaataatccacttaccgggaaaccaccaatatgttttgattgtttaattccagtcttttggagtaatggtaaactcgcaccgccagcaccaataaatacaaaatcagattcatatgttgtcgtttcgttagtttctaaatctttaactttaactagccatgctccagatttctgtttcttgatgtctaatacattttgcttatattgaatttccacaccacgttgttctaaattatcaaataactttgcagttaacgcaccaaagttaacatctgtaccagtttcatcataagttaaagcaattggttcatcagacttacgcccttcaatcattaacggtacccaagatttcatttcttcttcatcttgcgataatttcattttttcgaataaaacatttttctttaacgttgcaacacgactttttataaaagctacgttatcttcgccaatgacaaaactcatgtgtggcaccgcttgaataaagcgatctgggttatctaattgtcctgttttaactaaatatgcccaaaactgctttgaaatttggtactgctcatttatcttaattgctttactacaatcaactgtgccatccttaccttcttttgtatagttcaactcgcaaagtgctgaatgccctgtaccagcattattccatacatttgaactctcttcgccaggttgtgctaatttttcaaacactttaatatttttctcaggtgataattctttaagtaatgttcctaatgttgcactcataataccgccaccaattaagatgacatctgttttgctatgttgtgttgtcataacaaatacagtccccctttttaaaatgaataatggaacgttcgagaaatacgacatattaataccactttgaatcagtgtctcaacaggttcccatggtgatgctctattactatctactatgtatattaatattttataataacgaaactactttaattatatactttatgtgcgatagcacaaagacaaaaccataaaccttaacagctatcaaccaatttaatttgattgctgattactcactcttcattttaacataaagcgctaccattattataatgtcaaacttctttcatcaatgatccattaaaaaaagatgagatgttagaaaacatctcaccctctgtatatttatattttgaaatacgtttatttataataatgacaagatgaaagtccaaatacagatgaatattagtaaacatacactgtatttcaatgtcatttttaataattctgattccttaccaacttgttttactgctgcagttgcaattgcaattgattgtggtgaaattagttttgccgctacaccaccaactgtattagcagatacaagaagtgaaccacttgttccaatttgttgtgcaacagaagcttgaattggtgcaaataatgagttgttatttacaactgatcctgtcataaacacacctatccaacctaagattggtgatagaactgggaagacattacctgctttagcaataccttggcccattgctgcacttaaaccaccataagttgtgattttagaaattgctaagatgaaacaaattgtaagaactggtaaccataattctttaaatgtaacgccgaataatctacctgcatctttaaagttaacctttttagacattaaaattgtaataataatagttagtaaaatagctgtacctgtttgtccaataatatttaaagtcaatactaatggtttatgcgtaacttcgctgactgttccaggtaagttgaatttaaatactaatgatgataatgcaccatttggtaagaataagtttttaaagaatggcgcactccaaatcattacaatgactgttaatacaatgaacggactccatgcatgtaatactgcttttgcagaatgtgcttttgcaggttcaatttcttcatctttattaacacgataaatgtgttttggttggaattttttagagaatactgctaatgctaacattgttaataacggtggaataatatctgctaattcaggtccgctgaaaacagttaataatccttgagtaagtgtataagtgattgaaactactaaaattgctggtaatgtttctttaacacctctaaaaccatcaataataaagataagtaagaatggaataatgaaatttatgattgccaatgttaaagttgctgattgagaaacacctaatactgaaacatctccaggtaatttcaacgtttctacaacacctacagggataccaatcgcaccaaaagcaccagacgctgcatttgcgactaaacataacatcgcagcttttaatggattaaaccctaattgtgttaataaaagtgcacaaattgcaattggtacaccaaatcctgctgcaccttctaaaaatgcgttgaatgcaaatccaataagtaaaacttgaatacgttggtcttgtgaaatatttgtaatactatcttgaattgttaaaaattgtccagattcaacagtaattttatataacaataccgccatcataacgatatagccaatcggaatgatgccttggaagaaaccttcgactactgcaccagaagcgataccaactggcaatttgaaaaatggtattgcaattagtaatgttacaacaagtgttgtaatggctgcataaatacctttcattttaaaaacagttaaacaaagtaaaaacagtacaatcggtattgctgcaattaaagacgataataataaattatcaaatgggttaaacgtatttactaacataggctgactcttctttccataaagtagtagtgtaattgcttcattaaaatcatgctctggctatagcattttgttatcgataacattttacagaacagtgagattaatgtgatttttttcacaattaaaatataccattttttcagactattaacaatatcactttcctatttaattgttttatttttcattttaaatctgttcatcaaaatgaattgtacttaatgtaatgaagtaacttatactattcatgaattttacataagaccgtgctaaaataaggaagatactacgataagaaatggaagttatagcaatgattaaacagataaatgtttctaatatgcaaaagtttgaatctcaattaatgaaagctcagtctgaaggttatacacatgtcgttccatatgccaatgagataatgatttatcaatctatgttagatgcggttcaattatatcctaagtctatcgtggttgattatactgtggatggacaatacaaaaatgattgtcactatttcggtcaatcatcgatcaacattgccgattgggctcaaaacaataattattatcctaacctgatatatgcgattcaacagactcttgatttaatacattattactctgtagaaacgattttcgatttagctttattgacacttctgaaaggtgatttatcaatcgatggtcatgtcgtttttgattttaaagcccctttagcaacaagtgcttcaatatgggaaactattaaaactattgaagattttgatatgatgtctcagttttatttgaataaaatggcttatattgatcatcatcctataccttttcgcaacctttttatcgaggattcagaacaacttaattggccagatagttggttgtattctaccaagtttatgctacctaaatggttatataaaatagcaaagcaacgtgctgataacaaacaattacaaaacttcggcttgtatacgaagcaaccaaacgttttaaaagatcacatcgtttttatcggtgatcatcatcaatatataggtaattcaaaatatttatttacttacttcgttaaacataatccaatgactgcctgttattttgttactgacgatcgtcgcggaccacatttcatatcacctaagtctgaaaaagctgacgaattaattaacagcgcacgcgtagttttagttgaaaatgatatacctgaaacgttacaaccaaacggtactttaattcaattacatcaaggcacaccaataatgcaattatttttagatagtaaagagcctattaaaaatatagaaacacctttttatcgtgctaaaaggtataatcgctggttgcaattcgattatgttatacattctgctgatgatattagccacttttatcaaacggcttttcctagtcaccaagcaaatgtattggcttatggtaatcccaaacaccaatatttactacaaaagcgtaacgaaagtactactcaacaacagtataagaaatcgtttaaaataaatgatcaaaaaccagttttattatacgcacctattggattagtgagtgcgcaacaattaccactatcagatgctttattcaaagcctatcatgttgtggttcagggtgttgatgaaacgatgttaccagaagaggcgcttgttgcaccaaagtatcttagtgctcaagacttaattctaatgtctgatgtcgttatcactgattactcaaatataatatttgatgcgatggctatagacaaaacagtagcattatacactccaaatcacagtcaatatattgagtctcaaggtgttaacgaagatatttggcgtcatctatcaaaaatttggtatacagaccgacaattattaattaataatttaatttcccaggcaataccagtgattaaatatccacaaatacaacataaagaacaaccattagaatctatttcacaacttatattgtctaaaatgacatctaataaatagtgtttaaatccctcagtggctgtgaatgaggtttaaaagtactatagaacgtaaacctttttactttacttgacggattgtaatattaagtgcaacacctataaaaattcataaaaaatgcccataattggcactttgttgtaagatgttaataaccacaaaaacacatacaaggagtgccaacatgagctataaccatcttacactaactgaacgcgcacgtatagaggttttacgtcaagaaaattattctttaagatctattgcacgtaaattaaaacgatctgtatctactatctcacgtgaaattagtaggaataatttaaatcagtcgtatcaagctgaaacagctcaaaaaaattatgaaaccaaaagaaaactttgtggtcgtcctactcgatttactccagaacttggtaatatcattaaatattatttaaaatgccactggtctcctgaacaaatcgtaggtcgtctattacaaaatcaaatctgttttaaaaccatctatcgatggattaactctaatatgattaatttcgaacttatttcatgccttcgtcaaaaaggaaaaagacagaaacctaaagaaactagaggtaagtttaatattggccgtcctatttcacaacgtcctaaggaagtaaagaaacgtaatacattcggtcattgggaagctgacacaattgtatccagcagaggcaaaagtaaagggtgcattgctaccttcgcagaaagaaaatcacgttattattattgtgtacttatgcctgatcgttcctctaattctatggagacggcaattaataaccttatcaaacatctacctaaaggtgccgttaaaactattactgtcgatagagggaaagagttctcttgttatcaaaatattgaaaaccaatttaatattaatgtctacttcgctgatccatattccgcatggcaaagaggtacaaatgaaaataccaatggtttactaagagaatttttccctaagaaaacagacttagctaaagtaaatcaagagcaacttaactatgcattagactcaattaattatcgaccaagaaagtgtttaaattggaagtttccttatgaagttttatgtgatgaactgttgcacttaaattgacaaatcaacactttaaaatacgcaaaaaacggtaaaccctaattcatattatagagtttaccgttttaattttttaacttgcatcataattacattaacattattgttggtagtttggatcagtaaccattgcttgtccagtataatcaactgttacaattgaatattttccatttacgtttgggtctttaaaactaaaaacatacttatagttaccattatgttcttcaattgaataatcattataaactttatgaccattaccaaatttatttgcttcgttgttagctgcatttaaagctgtttggaaattaggcaattgttgtaatgcttgtgatttattaccattaaatggataaatttgacgagccactggcgctgcgttttgtccataatatggtgcaacgtaacttgatttttgattgttagtcgtttgtccactgtttgactggttattattcgtttgattttggtcattgtttgttgcatttgaattagattgttgctggttatcgtttgcactattatctttattatctttgtttacgtctttactattatctttattgtctttcttatctttagatgaatcatttgtttttttatcttgttgttcagttttcgctttatcatctttttctttattactgtctttttgttggtcactatcttgaccacatgcagctaaaaataatgataatgctaataaccctgtaactaattttttcatacatatctcctcctataattcgatattcattgaataagcttgaaatacatatctaccatgtgtatcatttcatggattgttaccaaagacgtcaacaataatatggtgttttatttcccccaatatcaacaactatcatctatggttctttttattataccctaaatttcaatcattattatctaatttttgcgaattttatgttttttatacatttaatcattttactcaacaattttattacacattttacatttctatacatattcaatgattacaacagcaatttctttttatcgacaacagaagttactgctataactctttttccataattaaatctgtatccgttacatcacctgtttgaaaatgatgttcaccaaccactttaaatccatgacgtttataaaatgcttgagcacgaggattatgctcccaaactcctagccaaattttatgtttattatgttcttgtgcaattttttcggccaatgctatcaattgtgaacctcttccgccaccttgaaagtctttcaaaaaatatatgcactgcacttctaaataggtctcccccatttcttcagtttgagcactattaatattcatctttatataaccaacattcgcaccatcttcttgataaaaataatgaaatgaatctacatggttaatctcttgtgtaaattttcctacagtataattatctttaaaaaattgatcaaaatctttgtcatcatagtaagaaccaaacgtgtcataaaatgttctagttgctaattccactaattcactagcatcttgttttgaaatttctttgattatcccagccatataaatcctccaataaacagtgatcgaatcaaaatattacttatgttatttttcagccaaaactatttaaaaatacattaacacaaatcaattacaaattgtattgattgtgtgtaacatcaataaatgatacatttattccagtaaaatggccgtattttcaaaagagaaaaagagaggatgtatcgttgtgatagaaacatttaaagcgtttgtaattgataaagatgagagtggtaaagtgacaccaactttcaaacaattatcgcctactgatttacctaaaggagatgtgctgattaaagtacattactctggtataaattataaagatgctttagcgactcaagatcataatgcagtcgtaaaatcgtatcctatgattccaggaatagatttagctggtacaattgttgaatccgaagcaccaggctttgaaaaaggagaacaagtaattgtaacgagttatgacctaggtgtcagccattatggcggttttagtgaatatgcgcgtgtaaaatcagaatggattgtcaagcttcctgatactttaacattagaagaatcaatgatatatggcacagctggttatactgccggtttagcaattgaaagacttgaaaaagttggaatgaatattgaagatggtcctgtactcgttcgcggtgctttaggtggtgtcggtactttagcagtactcatgcttaatgaacttggttataaagttatcgcaagtacaggtaaacaagatgttagcaatcaattacttgaacttggtgccaaagaagttatcgatcgacttcctgttgaagatgatcataaaaagccactcgcatcatcaacttggcaagcttgtgtagaccctgttggtggcgaaggtattaattatgttacaaagcgtttaaatcatagtggatcaattgcagttattggtatgactgccggtaatacttatactaattctgtattccctcacattttaagaggcgtaaacattttgggaattgactcagtatttactgctatgaaattaagacagcgcgtttggcgtcgtctcgcaaaagatttaaagcctgaaaatttacatgagatcaagcaagttattacatttgatgaacttccagaacaacttaacaaagtaattaaacatgaaaataaaggccgcattgttatcgatttcggtgtagataaatagtattcatgaaaaagacatctcgttatgcgagatgtcttttttaatttcttttggtttataaaatttctgatacttcatcaaatagcactttactttaatacattttagggaatcatgtattctccgcccctatcatacttgcaacactaatcaaatactgccaatataacttcgtagagcatagaatattgatttatgtcccagcctgtgtctaaaaataaaatttaatttctctttctatatacatcaaaggcatatattacccaataaacgactgtgaatacacaactatacaaaataactctctcaaggtttgttaaaaataaatagatcattaaagctgataaaacaagtgcaacaaaataatatattatagcttgtcttaatgtatcgattttcattgttctaactcccttagttacaaagtcgaaacttctatatcatatcaacttgaactttaccataaaacacacatttttttaatatcattacttagaataacaaaaacacactaagttaagctgtgtagaaaactcagtatgtttatcggtacgatttttcatttttaaaatttcatatacataccgcctgaatctggttctgtaggtataaatccaaattttgcatataatttatccgctgggtagtctgcgatcagactaacgtatgcactttcgacagatacatttttaatatacttcataatatgttccataatttgactgccgtaaccttgaccttggtaacttttcaaaactgcaacatcaacaatttgaaaaacagttcctccatcgccaatcactctacccataccaattaaccgatctttatcatacaaggttactgtaaataaggcattaggtaatcctttttcagctgcttcgcgcgtttttggactcatacctgcattaatccttaatgcgcaataatcctcgcaagtcggaatatcatatgtcactttaaccattatttaccccacttttcataacacaatatatcaacctagtataaatgtttatttacaatagtcttattcgcttctttaaacacttcatgatgacttgaaacataaccctctgcattcgcatctggttggatatatgttttagcaagattcgctgcatttgcaccatcactaaatgcacttgcaattagatgtgattttgcatcatgataaacaatatctccacacgcatagataccaggtatacttgttgtcgtattaccaaatcctttaacacgacaatcatcatgcatatctagctttgaagatgtttcactcaataatgtattacaacgatcaaaaccatgactaataatgacatcgtcaaatttaactgtatgcgtatcaccactttcaacatgttccaaaacaacttcacttatatgcgtttcatcatcattgccgaccaagtatttaatacgtgttttcgggcatagtttcacatttaaatctgtcaccagcgttttcatcgcttcatgaccacttacatcttcttttcgataaacaactgtcacgcttttagcaatcttagcaatatcatgggcccaatctaatgctgtatttcctccacctgatattaatacatctttatctttgaaacgtctgtaactttgtacaacataatgtaaattagttaattgatatctctctacacctttaacatctaattgttttggattaataatacccgcaccaattgcaatgataactgctttcgatgtatatatttctcccgcttctgtttcaacttcgaaatgacgttctgactttttcctaatatctaccacacgttcattcaaatgaacttccggtttaaaatataatccttgcttaattgtatcttttaaaatttcatgacaaggttttggcgcaatgccgccaatatcccaaataattttttcagggtaaattctcatcttaccccctaattcagattgaacatctatcaaccttactgacatatctcgcaatccagcataaaagcttgcatacaaaccagacggaccgccaccaatgattgtaacgtctttcattatgtgcctcctatgactctctatattcatttctttcattaacgcgctcaaattgataattattatcatttaaagacattatactattaatatttatattgttaaaataaatcgcatagttagccatgaattatcaataactatcccatcacaatataaaaacacacctttcaaagtacgaaacaacaatgttcctttgaaagatgtgtatattttttagttctagttatattattttttaaaagactcatcacgtggttctttaagaattgcttgtcttaaaaggaaaaatagcaacaataaacctgcaagcatacctgtgtgcccaatacctgcaaagcctgcaaacgcttctggagagtatgatttaccagtgacttggaagaatccttttgtcaccatcatacctatagtaacgataacacctatgttatatacatagaagaaccagttaaataagtagtaacttgataatttaaataacttctccaatggtaataatattaaaaacataaacatacctaaaataagtgtatgtgtgtgtacaagtgataattgtgttgtaccagtaaaatcatatgcttttgttagctctctatagaaaaagccactaaataaacctatgatcatataaaaaagaaatgaatataataacctacgcattttgaatcctccctcaccttttcattatatccgattatacctattataacagtgacaaaaaagcgaagatatgacacaactgaatttggtttagcacataatatgacagctaaaataactttacatcaagtgctatacaaataaaatagctataccatgacgctctctacaaacgtcttgtatagctatattcctatttattaaattatgacggcacttcagtacgttttgtgctatgttttctaacaatagctgaaactaaacttgatacagcgccaaaaatcataaaccctataaacatccacattgtactatttaattcaatatgatgattcaagtataatagttctcttacacttgttgcatagtgtgtgaatggattccaatcatatacatatttttgataactttcaggcaacatttgtttaggtaacgttacaagttgcatactaaagaacattaaaatgaagaaaattggaattgacttcatacctagccataccataacacctaaaataaggcccacgaaaccaagaatcgcaagtgctacaaaaattgcgatacgatttggatggtcaaaatcaaatccttgaacgccttgcatgaaataaatataaacgaagctaccagcaaatgctgcaacaactgcaaatatcatttgtccaattgaagcaatgatacgatgttgcacgacgatattgttactagttctaaatgcaaagaacaataagatagacgttacgattgaacctatccaaattggcataaacattaggaatggtgcattaccacctgcttggtgatctttaactttattaagttttttattatccacttttactggattcgtcaaaccattgatgtccgcggcattgactttaacattttgattcgttaatgtttccaaactttgcttcgtaatttgagcattaatattatcacccataccagttaacacagctgatgcaatttgtgaaccttgtaagcttgatccttcacttacaatcgttttaaatttagcctgcttaacctctacttgttgattccccattttttgtttcatttgttgaactacttgtggcggaatttcacctgaagcaactttttgttgcatttcttcttttttactatccataactactttttgtgttttactcatagcatcttttgaaaaatctttatcaataatagctactccaaatattttttgatctttcaaatctttttcaaggtctttttcactatcaaccttaacccatttaattttattagaatcactatctaataatttatcctctaattttttaccaatattaacatttttatcttgaatcgttgtacctttgtcctcgtttaatataccaattggtaaatcttttggtttaggattatatgcaggataaaaagctaaagaaaaaattaccaagataatcatagttgctattggtgcaatccataataatttatttttaaatatattcattttattaattacctccttattagacaatgtgttgaatatttcgcatgttgtctattataatatgtaagtgggaataaacaatacacaatgttcatcaatacgtttattaatagacaaatacacccacattgttcaataacacaaggaggttgatttatttttgaaagaagataggcgaattagaaagacaaagtcctccattaaacaagcgttcactaaattactacaagaaaaagatttagaaaagattaccattcgcgacataacaacacgcgctgatatcaatagagggacattttacttacattacgaggataaatatatgttactcgcagatatggaagatgagtatatttcagaactaacgacatatactcaatttgatttgttacgcggttcttcaatagaagacattgcgaatacttttgtaaataatatactcaaaaatattttccagcatattcatgataatttagagttttatcatactattttacaattggaacgcacgagtcaattagaattgaaaatcaacgaacatattaaaaataatatgcaacgttatattagtatcaatcattctatcggaggcattccagagatgtatttttacagttacgtttctggagcaacaatttcaattattaaatactgggtaatggacaaacagcccatttcagttgatgaattggctaaacatgtgcataatattgtttttaatggtccattaagaataatggcagaaaaccgtttgcataaatcaaaccttgattcactaacttaagtaatactcgcttttcctaaatcctttagaaaggaactatatatcatgattacttcattcagacattctgaagatatagataaacatattataaaaacaccattagatcatacagcgtcatggattaatgtagtagaaccagaccgagaagaaattgaaaatcttatggaacaatataatatacctgaagactttatacgtgaccctttggactcagaagaaagttcccgtattgaatatgacgaagatactggttactcattaatcattattgatttacctatcgtcaattcaactaatcgtagcgttctatcttttgtaacgattccattaggcattattattggcaacggtattatcgtaacagtttgtgacgctgaaaatgaatttttagaaaatttacctaagcgtgatattaatttaaaatttcacagcagatttgcattagaaattttaactactattgccgaccattataatcgtaacttacgattacttaataaaagtagaattcgtattgagaaagaactaaaaaataacattactaacaaacaacttttcaaattaatggaagttgaaaaaagtttagtatactttttagctgccttaaaaggtaacgatacaattattaaaaagttattccgtttacctgcaattaaacgttttgaagaagatgaagaattactagaagatttaatcattgaaaataaccaagccatcgaaacaacagaattacatcaacgtatcttagaaagtatcacaacatcatacgcttccttattatctaatgatatgaatacgattatgaagacattaacacttttcacggtactattaacgttaccaacgctcgtatttagtttcttcggtatgaatgtgccgttgccaattgatgaccatagttatatatcttggattattgtggtaggtatttcattaattcttgtcgtaattgttagtattttcttatggcgaaaacagaaattataactaaattaaaaggtatgacagcttaaagtttcatcctattgcatttgcaatgactgatactttgattgctgtcatacctctttttttattctacaacttctttatttgcttttcttttcgataaaattaaagtaactgttatagcaacgatgaatgatattgtcataccaacaaagtagtgtaaccatcctgcatgtactggattgattgaaataaatccaggcaatccagcagttcctaatgcgattgctttaaccttgaagaaagcaatatatgctgaaccaatacctgacccaacgatagcgccaataaatggatatcttagttttaagttaacaccaaacatagccggttctgtaataccaagtaatgctgaaatacctgcggcagatgccacaccttttaactttttattttgtttaataataaagaacgctgcaattgctgcaccaccttgtgcaacattagacattgtcgcaatcgggaatataaatgatccacccgttttagtggcatctgcaattaatgtcgtttctacagctataaagctatgatgcatacctgtaataacaatcggagcatacaataatccgaatattaatccaccaattgcaccaccaaattcataaagccatgttaaaccatctgataaccagtaacctaattgtcgagtgattggacctacaaatgaaaatgttagaaatgctgttataaaaatagataacaatggtgttaacaaattatctaacaccgttggaataactttgcgtaaccctttttcaattgaggctaagatataagctgctacaagcataggtaagacttgtccttgataacctacttgattaatatgcaaaccaaatacatcccaatatggaatagccttacctgcttcaactgcttttgggaaatcgtatgcgctcattagcgatggatgaaccaatatcatacctaatgcagcacctaaaaacggattgccaccaaagcgttttgctgcactaaatccaattaaaattggtaataatgtaaatggtgcattcgcaaaaacatttatcatttcagctaaaccagcaaattgactatatacatctatcaatgatttacctgaaaagaataaatctttcgcagtcaaaatgttatttaaccccattaataaaccaccagcaacgatggctggtataatcggaacaaagatatctgaaagcatttttacaaatcgctgtaacggattcatatttttagcagattgtgctttgacttccgaagtggttgatgcttcttttccagttaatttttccatttcactaaatactttattgactgtaccagacccaataataatttggtattgtcccccagtagaaaatgtccctttaactacatccatattgtttagcgcctcttcatttactaaactttcatcatttaaaactaatcgtagtctcgttgcacaatgcgccattgcatctaaattctcttctccgcctatcgcgttcaaaatatcttctgcggattgcttataattcatatatttagcctcctatttagaaccggttccatttattccactttattgtaaccggttccaaaaatatttgcaacactctattatcattttatataaacaattacagcacttttgatagcgcattcatttttattgctatactacatgcatgtatattaacattaattatcggaggtaattttatgaaagaacgtggccatatcgaacaactttggcgtgaggaaaaatatcatgtattgttacacagtcaacaggcttaccaaatgataagaaatgctttaaaaacggatttatcacttcatcaagtccaacaaatgattgatgatgctttgttaattgaaccgagtataggaagtgtatgtaatgcttttgatcatatgtggggatattttaaaaaatgtgcgaatgaagaagaaagacaacaatcaaaactacttaaagctgattttattaatggtaaaatcgacacccaaactttattagattttttagcagaacttgctaataaatatgatattcaatatttactacaaagtcgtgttttaaacacaaaaagaaagagatagattgaaactttagttgtaacggacaaatagtagtcattggagttcagcaattcatactttgtactaaagtttactataatctatctctcaaggtttaaatgtacatatctatattaaaatgcgtttcatgatgttagaagataccatacacatttaattagttacagcataaatcaatttatacccttaattattacattgtttatattttaaattcgggggagtaattttaagtaatatcttgttgctgctaattctattgttaataaattgatattagatgtagaaattgagtgtgaaagttaataatagatgatttagctagtaacataattaattcatatatagtcaaaaagttctgttagatactgttcttgatgaatattctttgatgttaggtgttagctattctagatgagtttcttagatgtggatgcctgtcttgatgaagttatctatgatgttaatataatacttgatgttgattcttagatgttagtgcgatttcaagatgctgattctttgttgttgcactatcttggtgacgtttctagttgtttatagttatcgcatctcttgatgtaaaatctaagatgtttatgcatttctagatgttaattcttcgctgcttaagaattatctttgatggtaaatctagttgtgccatgcattttctcatgatgaatctaaggtgttaattcattgatgtgtgctgtttcttgttgcttcattatcttgatggtgaatttcgttgtctaatgcactttttcaaatgattattctaattgttacggcaataactagatggattttcttagatgttcacttttctagatgtttatacttatcttgatgttttctaaacagaacttttaaacgctttattttttagtagattgtttaaaatttcttagttgatggttattgttgttgatttgaataatttgtagcgaatattttgtaacagggctactaagaatttttataacaagaagtgatttcaatcgaactaattttcagcgtttgatgacaaaagtgtatgtccaaacttaaataatggcgataaaatttaagtcatgggtacatttaatgttttttgattcaaacttccattttggtcaatttgctttttttataacatagttgaatatcaataaaagattagcaagttagttcaaaatggctatgtattgttttttgaaatacataggtttgaaatctatattaattatgcaccaaataatttaattagactctatcgaaaatttccaaattttgcttactatctttctaattttacttttatattgtgcacaatgcataaaaacaagcgttttcctaggagttttctttaatttattttatttttcactattaccttttcaaaaatattcaactataataggtatactatccatgattttaaaaatttccatgttttacatttaaatgatagatttcaatatatattaggcaggagagagaaatatgacatgccaacttaaaatacatcatacattatcgacaataccaagtcgtaatatcaataatattatggtgctattttcacttacaagtaaactcaatattacgattaatggtgaaaccaaagacgtaagtaattatattatcttaattaaccatggtgatatttataatattaaccacggcgaaaatataatcgaattgatgatacccgttttttatttttatcaacaagatgatgatttctttaatggttatttagatcgtcatttattacaatcaagtaattatattaagtcattaattgccgatttaatcagtacaccaacaagttcttctttaatgggaaaaaatataggtcaaagtattatagacactttacttaaagaagcttttataagaatagatcatgaatatttaccaaatattgctttaagcaatccggtgtttatagactgtgtaaactatattcatgacaatattgatgcgcacttgtctttaaaagatatagcgatgcattgcaacatctctgaatcatattgttctaatctttttgttcgatatttaagtatgaattttaaagattattttacaagtattaaacttgttaacgccatcaatttattactttctacaaaacattctattacaactgtttctgaattggccggttttaacagtcatacaaattttgcaaatcaatttaagaattacttgcattttagtcctaaacagttccgttcactcgtttccaagattactgaaccaccacaaatacacttccaacaagataacgtatcacaattcactgagttaatttcaacaattgatttaacagctcagctggctacaaatacaacagatattcatatagatgattttaatccgaaagatcgaagtcagcgtgccaaagtatttgttcgatttagtaatttcaatgaactatttcaatttattttcaatgaatattacgatattaactttgagcacctaccaaaacctgtcgttttcattgacgatattcacgatattgagattagccaaacgaattacaacctgttaaatagatgttttgaaaagcttttcgaaaaaaatataggtttagcaatcgctattaaatcaacacaacaattcgaaacgatgaagcaattaatactaacatttttacaaggcaatcaagactataagacaagcaagaaattagttaaatttatgctcgtattttgctctaactctatgacagcagaagaaattcatttatgtcatcttaaaattaaaaacaaaaataaagaaattaaatatagtgtgacagtcgatggctttttagaaacttattcaaccgtggaacaagtttatgatgtcatgcagcgtcttaaattccattattactttattgatattgaaaattcaaaaactgcaacacatcttatcactaaaaaccaacactatcatcaaactgacactcattttgaacagtataagaaatttattttagattcaggtatatcatcaacacaatttgtatataataacctgtctgtaagcggatttaaatatactaatgatggtaagaatccaattcaattatctgacatagtgtatcacttaatcgcattattgcgatatggcggtggcattagctatcaattattagatgaccattcaaattatatttccttgtacaacaaatatggtagccccctaccattaatgcatttatataaaatgtttagaccttttgttaatgaagacattgaaattacaaataattatgtattgagtcgtaaagataataactaccatttcttattattcaataaaattaatgaccgatatatgtcagacgtaaaacaagacttcattttccataatgaattacctcaagattctttgatgattattaaaactttgaatcatgaacgtggttcaattcaacatttgcttccaacaagcgatcaacttgtctatatagaaaaagaaattctagatgaattagacaaaacgaattaccctaaaacggagcttgcagttcaagaagaaactggtcgtacatttgaactcaagttaaatcacgacgaggttaaatatatttgctttaaaccaagctaaatactaacagtcctcttgtgtttagtttcttacgttaaaggctatttatatcataaggagatgatataggatgagtaactcacaagcaattcaagcaattgaaaacgtgctagcaacgtcaaaagttggtgtattatcaactgcatataataacaaacctaatagtagatatatggtcttttataatgatggtcttactttatatactaaaacgaatatccattctgctaaggtcaaagaaattaaagataatccagcagcatatgttttattaggctataacgacacaactaatcgtagtttcgttgaaatggaagcgacaatcgaaatcgttacagaacaagaagtgattgattggctatgggaaacacaagacaaaagctttttcagttcaaaagaagacccagagttatgtgttttaagagtagttccacaatccattaagctaatgaatgataaatcattagatacacctattaaaattgatttataatatgtaagtttttagttttaaaattagccagcaattgaacatgttagctataaatttcaacagtatcctatttatatatatttcgattttgaaagcgtttaatacttttaactatatttttattatataacagtatttcagacacattttattcacatttattgtgattaaggtgtgtctttttaaattaattttatgtaatataaatactgcatttgcaaactgttgtacttttaggtataacagaattaactacatttaaggagattgatgaaccgtgaaaaagaaaaaaggttttggtcttggtattagtttaattgccatcatgttgattgtatgtattgtactagtaatcatgatgatgactggtggaaagaaagatacatattatggaattatgaaagacaatgctacaatcgaaaaaatgattagtgaaaaagatgaaagcattgagaagaacgttaaattaccttcagatgcagacgtttcagttaaaaaaggcgactttgtaattgtttataaattagcagattctgataaaattgttaaagtaaaaaaagttgatcatgacgatgtaccacatggtttaatgatgaaaattcatgacatgggcaaaatgcacatgaaacactaattaagctttaattatgagtaaaatataagatattaaaagcagcagtaagatgttttctaattgaaaattatcttactgctgctttttttgagaataaatataccagtttatttgcaaatgccctgcgctttagcgcatgcataaaagcccctaacaaccgaaggttgtaaggggctttaaatgtcagatagtattttttaaattgattttaaatattcttgaccttttgctttatcgtatacgttttcccatttagcaataacaattgttgataatgcgttaccaataacgtttacacatgtacgaaccatatctaagatacggtcaacaccaataattaatgctaaaccttgtgccggtaagcccatggcgcctaatgttgttaataaaacaacgattgaagttcctggtactgccgccatacctttagatgtaatcattaatgttaacatcaacacaatttgctctgataatgttaagtgcattccatacatctgtgcaacgaataatgctgcaatagattgataaagtgctgatccgtctaagttaaacgtatagccaatcggtataacaaaggatgtaatatcttttggtgaaccaaagttttccattttcttcatcattacaggaagaacagcttccgaacttgatgtagaaaatgctaaaagcaattcacttttcaagattctaataatattcatgatattaataccacacatccatgcaactagtcctagtatagcgaatacaaagaacaccattgcaaagacaacaactaatactaattttaatagtggtaataatgctgatgcaccaaatgtaataattgtagtacaaatgaatgcaaacactccaagtggtgctaattttaaaattttattaatcatccagaacacagcttcaagcgatccgcttaaaaattctttaactggttctgcttttttacctactgcagctaatcctaatccaaagaatactgcgaagaagataataggtaataattcacccttatttaaagcttcaaaaaagtttgtcggaataatatgtacaatggtatcaataaaatgatttccatatgtagattgttctgctgcatgtgcagttgattgatatttagaaatatcacctttaggtaattttgttgggtctaatccagcacctggtttaaataggttaccgaagataatccctaaacctattgcgattgttgtaataatttcaaagtataaaattgttttccagccataacgccctacagttttcgattccccaacgttcgaaatagaaagcgctagtgagcaaaatacaactggtataacgatcattttaattaaatttaaaaatacgtcaccaaatggtttaatgtaatttgctacgttttcttgtccatataataaaagtcctacgacaacacctaacactaatgcaataactacttgcataggtaggctaatttttctcttgaatagagccatagtacaaactccccttcatctgacatcactcaattatatcagaaaattgataattatctataaaaaattaaaatatttatcttttatagatgtcaaaaatcactaatttccatacaaaaactgtttaccttaaataattaaaattgcaggcactaaactgtttcatcagttatacgtttcactattttgatggtttataattttgattgaaatatttatgctttgcagttttcaaacttttcttagtctctgtatcaaagccttcaacaaataatcctttattagtactgattggttgcacaacataagttacaccaggttcatctttaaacgtaacttccttatagaagagaccttttttagcactatactctgttttttctgatttaattttatcttttagacttttctcttccaagtaactgtcaataagttgaatattcttatggccttgatatgttttcagaccaaagaaaaatgctacagcaacaattaatgaaataaataatataatgataactttaatcgcgttttttttcttcttcattatgtaactcctttttgcttatctattcagtatgaacgaatcaatttatttaataaagagtttttaccagattgtaacaattttttcttctcaatattattatagaaatcgaattacatacacgatgcttttaaaaaatttaataacaaatttcattttactatctatcaaaataattgactacttttaacaattaagaatgatacaattacatttttttcaattcaaaaaatcagtcatatcagtcattaccgatgaaaatactaagatattgatatgttttgcattatttaacatttaaattcaattatagacaattcgataattgcgatgaaatcagtacttgacaactattacacttcataatattgtttattttaacaaggagtgattggatgtatgtagaaaacagctatcttagcaaacagttgtgttttttattttatgtttcttcaaaagaaataattaaaaaatacacaaactatcttaaggattatgatttaacctatactggttacattgttttaatggcgattgaaaatgatgaaaaacttaacatcaaaaaattaggtgaacgtgtattcttagattctggaacactgacaccattactaaagaaattagaaaagaaagattacgttgttcgaacacgtgaagagaaagatgaaagaaacctacaaatttctctaacagaacaaggtaaagcaataaaaagtcctcttgctgaaatttctgttaaagtatttaatgaattcaatatttcagaacgagaagcatcagacattgttaataatttgcggaattttgtttcgaaaaatttcgacaattccgacaaaaagtaactccctatcataagatgatgggcagaagtatgcatcgctatgtttattcattatctttattgcttgtataaatctcgatgctcagttcttttgccctgattccttatcaggcacaaatctatccatttataacttttttattccccccttttactttatctttttttattctactcatataatgactttgtaatacaaatttatataatggaagtgatgatattgaacttcaatcaattcgagaatcaaaacttttttaacggtaatccaagtgatacatttaaagatttaggtaaacaagtatttaattactttacaacaccttcatttgtaacgaatatatatgaaacagacgaattatattacttagaagctgagctagcaggtgcaaataaagaagacattagtatcgatttcaataataatgtgcttactattcaagctactagaagtgctaaatataaatccggaaaactcattttagatgagcgaaacttcgaatcattaatacgccaatttgattttgaagctgttgataagcaaaatattactgctagttttgaaaatgggctattaaccattaccctgcctaaaatcaaaccaagcaatgacactacttcatcaacatctattccaatttcttaattaaatttaaaatgaatacattactaaagccttaatgtcatgctactaacgttacacatggtattaaggctttatcatttaaatttaaaaatgcttcgtattacatatcaactgtgtttcaatgaaccatattctttttgatataaatggcgcattgtaaataatgcaatgcatccgaataccgctaagaaaataaatgctaaatggcttgaacctgttaaattagctacgtatgtgatgaccaacggtgggaagaatcctcctaaaccacccatcattgatacgataccatttgctgatcctgcttcatttgagaagtatgatggtactaatttaaaaattaagccgttaccaatacctgcacaaatacttattgttaaacaacctacagtaaataatgcgatatggtctgaaatacctaaaataacggcaccgataatcataataacaaaatcaatcatcagtactttaactgcattaaatttatcacctagtataccacctattggtctcaagaatgttgccagcgcaatgaatacacctgaacgaataccagcatctactttgtcaattccaaaatgatttactaagtagttaggtaagaaaataccaaatgcaacaaaagcaccaaaagtaatgaaataccaataacttaagtaatataatttgtagtttttagataatgttttcatttgggccattaatggcactttaattttacgttcttgtgtgtcaccaaaaatgaacataattaatgcaaataaagcgataataattaagtaacttctaactgttgtttgccaaccaataatacccgctatcggtggtgctaaaaatgaagaaactgctgtaccgatattccccataccataaataccatttgctagacctactttttctttagggaaatatttaggaactgatgtaacaccaacagagaaaattgcgccacctacgccaaggaaaaatcctgatgccattaacatccccggcgtttgagcttggctcaagaaaaatatcgggaataacaatacgataaaacttgtaaagaatacccatttagcaccaacaatatttgttaaataaccaaatggcacacggagcactgatcccaaaataactggtatcgctaaaatgattgatatttgaccttcagttacattgacatcctgtttaataaaaggcattaaaggagcaataatactccaagccataaatccaaccactaaacttaatgtttgtaatgtaagttgaaagccaccttttgttttgtacatacgtttcaccttcaccaaaatcatttattttttaatagatatcaatactctgcctatatgttagaggtcaatgttatttaaagagcctgggaaataaatcaatgttccatgctctacgaagttatattggcagtagttgactgaacgaaaatacgcttgtaacaagcttttttcaattctagtcaaccttgccggcggggccccaacaaagagaaattggattcccaatttctacagacaatgcaagttggggcgggacgacgaaataaatttttcgaaaatatcatttctgtcccactccccaatatagacaaagtattgactacacatttattttattatgattgtgaaaaagtgaacataaggattttcccttatttatggtgtaatttcccctatacaatgtccctttacgatgcatttagacactattttgtcattattttaatcagattattaaggatcactcacatgcatttcttaaatttttttcaattagttacaattactgcttgaaaatcacgttacgttaccctttatgctgacaacgtaaggaggtttatcatgtataaaatcaatattattagatcagattccgtctataagaatatactcaaggcaccattaaacgaccgtgattcaattttcactaaagaaatattagtaccttttaaaaagaaatttgaggttcaacagattcctattcataatgatgccaagcagacaatgagtgcaattcaatttttagatgcctttcaaaagtctcccaaagatttacgcatgtctgaccaaatgtcaatacaatacctgaacaatgatttctggagtaattgcaaaaaatatttaaaagttgctatagatcaatttgcaaattatagtatctcatctcaagtttctaactatcatttcacagtattacttggagatagccaaaaaccacttatgtatctaaataaaaatcgcggtggtgatggtggcataccaggttatattatgatttatttagtgccaagtataagtacaattaattctatgaaaagcttaattgcacatgaagtaaatcataatatgcgctatcaatatattgattgggatggcggaagtttgattgaattgattatcgcagaaggattagctgaaaactatgtagaatctttgtatggtaaagcgcatattggaccgtgggtaacaaatactaattggagtcgtgataacgtaaaaattaaaaatactatttataatcatttacatttaaagcatatatttgaatcgatgccttttctctatggtgatgatattaataaacttcaagataggtctatcgttggcttatctcatgctgccgggtatgcatgtggctatcacttggtgaaatactttttacaaaaaacaaacatacctattgaagttgccacaacacttccagcacaaaaaataataaatgaggtgactgaattttggcatacacatacactttaaaagatattattgaaattacaggtgtaactaaacgaactttacattattacgatgaaataggattattagttccaaataaaaatgataaaaattatcgcgtttataaacagcaagacttagaaaaattacaaaaaattttaatactcaagtcttttgattttgatatcgctaaaataaaacaatacatttcatatgataatgaacaattgcgaaagttattatcagagcaagtaagcaagttagataaaaagatttctgacttacaattaattagacgctctgtatgtgaatttattaaaggacactctctaatagataccagcattttaaacaagtcactacagacacaatatgataaagaagcatctataaagtatggtcatacgaaggcatatcaatcatttattaaccgtcaagataacttacaatcacaggatatcagacagaaattgacaacgatcttcaatcaattcaatcaaatgtctttaagtcattatccaatccaagactgtaatgatatcgtggcagaatggaaatcttttatgaacacaatcgctgattttgatgatgaaacattatgctgtattgctaaaacatatgaaaatgatacgcgtttcaaagattactttaattcatatgataatcaaaatttagcatcatatatttcagaagctgttaattattttttgagcaatgagaataagaaagacaatttttaatcctcacatagagactaaaacactgaatacaccctaactaacatgtcatgtccaaaatagacaactactcatttattctctatatcaatagctatattaaaagttattccgtttccaataaaataagtatggctttccaaaaggagaaagtattagcttccatacggttataaaaaatatatttcgaaacatacaaaagcgccagaagataatcatttcctctggcgctttgtatggtattaatttcaaactctaaaactctaataatttctttttcaatgcatattcaacgagctctggtttacttttcaagccaagctttgtcataatatgcgttttatgtgcctctactgtctttacagaaacaaataacttctctgcaatttctttattcccgtaacctttggcaataagtggcaatatttctagttctcgttttgataagattttaaaaggatctgatgtgtttgcagtgtcctgatttgaattagatacaaattcattcactaaagatgttgtaagtttcatatctacatatgtttcacctttatataccgttcgaatagctaacaataattgttcatcaggtgcatttttcaatatgtaacctttcgcaccattacgcaacacatggaacaagtactcttcatcatcaaacatggttaatattaaaattttagtttcaggaaaactgtcagcaattttactcgtagcgataagacctgactcacctggtggcatgcttaaatccattagtaacacatcaggtttatattccattactttttgataagcttcgacaccatctgcagccgttgcaacaacttccatatcattttgataatttaaaatcatagagaatcccgtgcggacaacagcgtgatcatcggcaatgactattttcaattttattcccccaatgtatgtttcaaattggaatgttcagtgtaacattggtgccctcaccaattttcgtttcgatgttgacgctaccactgactaattcagctcgctcattcattccatataaaccgagtccagaacctttaggcttagaacttggatcaaaaccatttcccgcatctattacttcagcaaccaaatggcgcccagtttgacggatacctacatttatttcatttacatcagcgtatttcaacgcatttaaaatagcttcttgtactactcggtaaacaaccgtttcaatatcactatcaaaacgggtatttttaatattggaagtatatatgattttaaccccataattttcttcaaattgtttaaaatatgatttaaacgctgcctcaaggcctaaatcatccaaagaggctggtcttaattccaccgacatattacgtatatcatcgattaatttagcgacaatgtattcaatgttttctgcgtcttccaaaagctttgctgtatcttcttgatatttcaacaatcgcaattgaacatctacatttaacatttcttgaatcacactatcatgtaattccctagaaattcgttttcgctcattttcttgtgcggaaatcgttttacgcatcatacgttgttgatgcaatttttcttgttgttcaatttgtgatgagacattttgaagcgtaaatgcatgaatccctctatcctgatcaataagctgataagttgcagtaaacggcatcactttttgatctttcgtcttcataaacacttgaaaattcgtagcttgtacttgcatggactctaagaaacaatctttacatgattgtacgtcataagcattcgtatacccttcacatctgtgacaaatcgcattcgctactgcactataattatcttcttcggataatatatctttagctgcatcattcatcgcaataattttaccactatcgtcggcaaatactattttttcgattgaatgttcatagtatttttttaataaagcttctaattgtatactgtcctcattaatcatgacctacaccctaattcatctcattatttatcatcattgaaaataccaaatttgcgttgaatatcatcgttatcaaatatttttggtaaaggacgtccatctctttgaccaaataatagtacaccatacacttgatttttgtaccaaagcggtacagctaagactgctgttaatgattcgcttaataaaattggatagtcaatcttttcttctggtcccaatgctaaaccgacattagctataatcatacgcttccctgttttcataacagttccagctaatccacggccttttcttaaaataattaatttaaaccgattatttttattacctgaaacatagtgccattttattggagatgatggtttgttagattcatagaaagcgattgccgcaaaatcataaccttcttctttgcgtattttatctaatgtctcttgaaatctacgatcttcaataattgcttctggtgtcaaatcctttcacctcttatacttacactttattcttacggtaaataatatatctgcgatttatatatgtcaaaggtacactccaaacatgtactaaacgtgtgaatggccaacaagccataatagtgaaacctaataatatatgaattttaaatgcaattggtacaccactcattaatgatgcatctggtttcaacataaataattgtctaaaccaaattgataacgaagttctataattaaaatctggatgctgtacgtttgttactaatgttgcataacatcccataaatacaataagtaataataagaagttaacaaagatatcggacgctgaacttaatctgcgaatacttttcgtagtaacgcgtctcgctgttaataaaaacatccctaccaatgtaattataccaaagatactccctatataaacagcaccaatatgatataaatgctcagacacaccggcagcatccatccacgacttaggtattaataatcctacaacatgtccaaaaaataccggaatgatacctaagtgaaatagcaaactaccccacatcaatctttttctttcaattaattcactagattttgctgtccacgaaaatttatcataacgataacgtgcaatatgacctgcgacaaagacaactaaacataaatacggaaatataacccataaaaactgattaagcatgatgtttcactccttttggtgatgtcaaacataatttcaatgtttttctaagtgcttgaatcacataggcatatggattgttatcttcaccaagtgcattcgccatcacatatgttccatcctcaataatcataatgattaattgaatattctcttcagctcttggatcatttcgccattctgccacttgtaaaaattgcaacatcaacggtagataatcagaaagttcattgtctaccatttctagtccaaacatctcgtacaatacctttagtttcgctaacatttgcccacgttctttttgtgtatcaaacttgttatacgtcatatataatggcgctttttttgtaaaatcaaatgtatcagtataaatcgctttgatttctgataatgaaaatgtcatcattacatttctaaatgctattaaatcgtcataccctggatgatccttcgaaattgtttcttcaaaagtctttggatgaaatgttaatttttccggaaagcatagctgttgcgctatatatccaaaactttcttgatactttttaaaattatcgaaattaatcacggaaaatccctccatagaaattctcattataaatttcttgaccagtttttcctgaacctactgcaacaccacaaccttcacagttatcaccaaagtgttcgccaccatagttatatcccgtactaccttgagcatgatacgtatctaaatatgtttccttatgtgacgttggaataacgaatcgatcctcatattttgcaagtcctaataagcgatacatatctttagtttggcgttcagttaaacctaatcgctctaaacgtgatgtatcaaatggttgttgtgtaacttgggaacgcatgtaacttctcatcattgccatacgctgcaatgcttcttttactggttttgtatctcctgccgtgaaaatattcgctaaatattcaatcggcaagcgcatttcttcaatggctgggaaaatcgcatccggattttgatttgtatttttaccttcgaaatagctcataattgggctaagtggtgggcaataccaaaccatcggcatcgttctaaattcaggatgtaatggaaatgctagtttatattcaatcgctaacttataaattggtgagttttgtgcagcttcaatccaatcataactaatgccatctttttcagcttgtgcaatgacttcttcgtcgaatggatttaaaaatatatctaattgcttttcatataattctttttcatctgctgcagatgccgcttcatgcacgcgatccgcatcgtataataaaacacctaaataacgcatacgtcctgtacaagtttcagaacacactgtaggcatccccgcttcaattctcgggaaacagaaagtacatttttctgctttgttcgttttccagttgaagtatacttttttatatggacaacctgtcatacagtaacgccaaccacgacaagcatcttggtcaactaatacaatgccatcttcatcacgtttatacattgcaccagaaggacatgaggcaacacaacttggattcaagcaatgttcacacaaacgtggtaagtacatcataaatgtttcatcaaattggaatttaatatcttcttctattttttgaatgttaggatcttttggacctgtaacgtgaccaccagccaagtcatcttcccagttaggtccccattcaatttcaatattatcccctgtaatttctgaatacgctctagcaactggagaatgattacctgatttcgcagttgttaaatgttcataattatagttccatggctcgtaataatctttaattagtggcatatctggattatagaaaattttccctaatgcaatttttgaaattctacttccagattttaattcaagtttccctttacgatttagtacccaaccacctttgtaatgttcttggtcttcccaacgtttcggataccctacgcccggcttagtctctacgttgttgaaccacatgtactcagcacctggacgatttgtccaagtgtttttacatgtcacactacacgtatggcatcctatgcatttatctaaatttaataccatcgcaacttgcgctttaatcttcaagccagttaacctccttcatctttctaactgctacatataaatccctttggttcccaattggtccataataattaaagtgataactaatttgtgcgtatcctccgactagttgtgttggtttcaaatggattctagtcggcgcgttgtgtgaaccaccacgtgtatctgtaatttctgacccaggcgtttgaatatgtttatcttgtgcatgatacataaacattgtacctttaggcatacgatgcgaaataactgctcttgccgttacaacaccattacggttatacacttctagccaatcattatcttggatatcgtgtttttcagcatcttcatttgatatccaaaccgttggaccacctctaaatagtgtcaacatatgcttattatcttgatacattgagtgtatattccattttccatgaggcgttaaataacgcagtaccaaagcatctgtaccacctttaattttcttatctctattaccaaataccattggcggcaatgtcggtttatatactggtaagctttcaccaaactgttggaaaacttcatgatcaacataataactttgacgacctgttagcgttctaaaaggtactaaacgttctacattcgttgtaaatggtgagtaacgtcggccttgtttattagatcccgggaatactgctgttggtataacttcacgtggttgtgatgttatattcaagaacgaaattttttcagcagcacgctcactagaaatatcttttaacggcataccagtttgttcttcaagatcctcatatgatttctgtgataactttccattcgtagctgatgaaatattaagtatggcatcagcgacattacgtgctgtatcaatacgtggacgattcgttctgacagaatcttcatttgtgtcactccacgtacctaacatactttttagttcttcgtactgctcactgacaccgaaacttacaccatgtgctccaactttccctttttcaagtacaggaccaagcgtgacatatttgtcgtaaattttagtgtagtcacgttctacgatagcgaagttaggcattgtacgaccaggtaccgcttcaatttcacctttcgaccaatctttcactacgccatatggtgtagatatttcttgttttgtatcatgactaagtggtgttgtcacaacatctttaaatgttccaggtaaatagtcttttgccatttctgaaaatgcttttgccaatgttttataaatatcccagtctgaacgtgattcccataatggatcaatagcaggattgaaaggatgtacatatggatgcatatccgttgatgataaatcatgtttttcataccaagtcgctgccggcaaaacaatgtcagaatataacggtgttgccgtcattctgaagtctaaagagaccactaaatctaacttacctgttgtttcctcacgccacgtaatttcttctggcttttcatcttcatttggtgtagctaataaccctgattttgtgccaagtaaatgcttcataaagtattcttgaccttttgcagaacttgagattagatttgagcgccatataaacagtgatttcggatgattctttttcaaatccggatcttctatcgcaaattgcgtttgttttgatttcacttcatcaattgcacgttgcaaaatcgcttcatttgaatctataccttcatctttagcttcttctgcaaacaacaagctatttttattaaattgtggatatgatggtaaccaaccaagtctagctgctaacacattataatcagctggatgttgatgctttaactcctctgttttagctaatggagattttaaacgatctacatttgactcttcatatttccattgatctgtcgcaaaatagaaccaacttgttccgttttgcaaacgtggtggcccttgccagtctttcgcaaatgcgacagtactccatccttcaatcgggcgacatttttcttgtcccacatagtgagcccaaccgccaccattcacaccttgacagccacataacataactaagtttaagattgaacgataaatcgtatctgagttaaaccaatggttaatacccgcacccatgataatcattgaacgcccttcagtatcgatagcgttttgcgcaaattctttagctacttgaatgacaacactttgttttacgcctgaaatggcttcttgccaagcaggtgtatattttgattctgcatcgtcgtatccttttgattctaatttatgatcaaaacgacgcacgccatattgacttgccattaagtcaaaaattgtagcaatacggactttgtcaccatttgctaaagtgacttgtcgagttggaattgggcgattgaatatcccatctccatcactatcaaagtatgggaattgaattgtttctaattcgtacccaccttctgtcattgataatgtagggttaattttagaaccatcttctgtttctagttttaagttccatttcttaccttcttcccaacgttgacccattgtgccattaggtaccactaaactgtcactgattgtgtcgtggattaccggtttccattcactttgctctgtcgtttgtcctaagtcacttgctcttaaaaatcgacccgctttatatccattttcatcttcatctaacatgatgataaatggcatgtctgtatattgtttcgcataattaataaagcgttcattcggttgattaacataatgctcttgtaaaataacatgtgtcattgcttgagcaattgcagcatctgaaccaggattcggtgctaaccagttatcagcaaacttcacattttcagcataatcaggtgctactgaaataacttttgttcctttgtagcgaacttctgtcataaaatgtgcgtctggcgtacgcgttagtggtacattagacccccacataataatgtatgatgcgttataccagtcacttgattcaggtacgtctgtttgttctccccaaatttgtggagaggccggtggtaaatctgcataccagtcataaaaactaagcatttcaccaccaagtaaattgatgaatcgagcacctgctgcatagctaatcatagacatcgctggaatcggtgtgaatccagcaattctgtcaggaccatattttttaattgtatatagtaattgtgctgcgataatatccgtaacatctttccaatttgaacgcacatgtccacccataccacgggcttgcttatactgtttggctttgtcttcattttcaacaatagaagcccatgcagccacacgattaccattgttttcttctaatgcttcagtccataaatcccaaagtttcccacgaatatatggatatttaattcgaagtgggctgtattcataccaagagaatgatgcaccacgaggacagcctctcggttcatattcaggcatatccggaccacaacttggatagtcagtttgttgattttcccaggtaatcacaccatttttcacaaagactttccaagaacatgatccagtacagttaacaccatgtgttgttcttacttccttatcatgactccaacgttctctgtacattttttcccattctctacttttactttctaggatcgaccaattcccattaaatttttctgttggcttaaagaaattcaatccaaattttcccatatttatatcctcctacgtataaaaatacgatgtgtagatgtcgtgtttttaaatactaaaaatgcccaagactattgctttaattagattgtacattttttcacaaatataaaatattagggaattacctaattacttaaggaatttccctatcaataacgggatttcattgaaataatacacaatcatgtgtggtcatgcttattgccaatctaaatcgttcaaatttggcacaacgacaaataaggcttcaacacgaatatattctctcggttgaaaccttacttattcatttatttttataaattagtgacataacactgtattagtatctgcacgatcggttgaaatatatgttacattttcttgttgcttaataaacgcatcatagtaatcatattgcgatgaatgatatgtgccattcgatgtatcatctgggtttagcaaacagccataaccttcgtcatataaatgttcacagagcataagggcgtcatgtttagaaccacttactacataaaattgctgagtcggattagaagttgttgagacattttctgtataacccactacttcgcctataatacatatacctggttttgcctcaattgcgtaatgctccagtttcccaacaatattacttaagcgccctttaacgacgaattcattaaaacaagatgcttgaaaaacaatcgctatcggataatcaatatctgtgtactgttgtatctgggcgataattttctctaaacgtttaactcccatatatatcgccaacgtaccaccatttactaaagcgttgacatctacttcattttcttctgaatctttaaaatgccccgtcgaaaatgtaacacttttagcaacagcacgcatcgttaatcctgtttgcatcgtagcaactgcagcactcgcagatgtcacaccaggtacaatttcaaacgcaatattaaagttgtttagtgtgtcaacttcttcttgaactcgtccaaatattgctgggtcgccacctttaagcctcacaaccttgttatatctacgtgctgcttccacgatacattcatttattttttcttgctgaatgtgttttgcatatggctttttaccaacatctataatctcagttgtcgacttcgaatattgtaaaatcaacggattcactaatcgatcatatagtataacatccgcttcacgtattaaacgctcagcctttttagttaaatagttaggattaccaggacccgcacctatcaagtaaaccttgccgtaaccatttacagacatatatatacgttcccgtctgtaacttctacctcatatacatctacacaaccttcatcaggttcttgtacaatcccagtatttaaatcaatcttttgatcatggagtggacagaatacatattcaccactcactgttccctctgacaatggaccttgtttatgcggacaaatattgtgaatcgcgtgaattgtaccactttcagttaaaaacaatcctatttctttgcctttgacaataacctttttaccaattaagggtgtcaattcatctaaagttgtcactttgattttctctttcgtttccatgtattacaccttctccacttcaaagatttttcgagcttgcgcattactagtgattgcttcccaaggttcagcttcgactgcttttttagcatccataatacgttcaaataattcattctgtctttctggatcaagcaacacttctttaacattttcaaaccctagtcttcttaaccacggtgctgttctttcagcataaatacctgtctcgcgataatattgcatcaaagcaccacataatttgattacttcatcttctgtttctacagttgttaaaaattcagctttttcaacttctgtaccaccattaccaccgatatagatttggaatccattttcaactgagataacaccaaaatctttaacacctgattcaacacaacttcttgggcagcctgatacacccattttgaatttatgaggtgtatcgatgtattcaaatgttttttctaaacgaatgccaagtcgcgtcgtgtattgcgtaccaaatcgacaaaactctttaccgacacagcttttaactgagcgtgttttcttaccataagctgatgctgaacgcatacctaggtcttgccatatatttggtaattcttcttttttaactccatacaaaccaacacgttgcgaacctgtcactttaactagtggcacatgatattttttagccacttctcctagacgaatcagttggtctgcatctgtaacacccccacgcatttgaggtataacagaaaatgtaccatcattttgaatattcgcatggtaacgttcgttagcaaatcttgattctctttcatcttcatgatcatgtggataaaccatattcaaataatagttgattgctggtcgacattttggacatccacctttgtttttaaagtttaaaacatgtcgaacttctttagatgtttttaaacctttcgctcgtatttgcgtaacaatttgatcacgtgtcaaatcagtacaaccacatatacctgcaggtttagcagcaacaaagtcatcgcccaacgtgtgctgtaagatttgagcaatttgcggtttacatttaccacatgaattacctgctttcgttttagccgtaacttcttcaactgtagtaaaaccattttccgtaattgcatttactatcgtgcctttatcgacaccattacagccacaaattgtttcatcatcagccatatcagcaattgatagcgatgcctcttctccacctttagtaagcaatgataccagtgtgtagtcttcagtagattcaccttttttcatcatgttataaaagcgtgaaccatcatcgatatcaccatatagtactgcgccaactacattaccgtcttttaaaaagatttttttatagttattatcaacgctattaaatatttcaatacctttaatttcagcattttcaacaatttgaccagcactatataggtcacacccagaaacttttaatgacgtaaatgttgttgatcccttgtatccgttcgtttctttatttgttaaatgatcagctaatactttaccttgttcatataaaggtgcaactaagccataaactttaccattatgttctgcacattcaccaactgcaaatacattgctatcacttgtttgcatcacatcattgacaacaataccacgattaacatctagacctgattctttggctacttctgtgtatggtcgaatacctactgccataacaactaagtctgccggaatctcgcgtccatcagccaatttaacaccttcaacatcatcttctcctaagatttcagttgtgttggcttgcatttcaaacttcataccttgcttttctagatctgctttaagcatatttccagctttacggtctagctgcatttccatcaaccattcagctaaatgtaacaccgttacttccataccttgatctaataaaccacgtgcacactctaaacctagtaagcctccaccaattacaattgctttctttttagtcttagcaatgttcatcatttgttcagtatcatcaattgttctccagccaataacacttggtaatgtcgaacctggcactggaatgacaaatgctttagatcctgtcgcaaatattaatttatcgtatgctacttcaataccatttgcagtcgttacattttgatttgttctatccacgtcaactactggatcattggtaattaacttaatatcgtgttcctcataccactcatatggattcataattgtttcttcaactgtcattttattttgtaaaatatttgaaagcatgatgcggttatagtttggataaggttctttaccaattactgtaatatcatataaatcattggcacgctctaatatttcttcgattgttcgaatgcccgccataccgttaccaatcattactagtttttgctttgccataaaatatgcccctttactacataatatttatttcaaaaaaaggtgttaacttttcgttaatgcttttatgttttcattggagtcactaagactttctaatctatcgttaataatttgttttaaaatcgggtcgaaattaatagaaggtgtgatgtgtatatctgtattaataaccatgtcattcatttgctgcttcactttgttaacaagtcttccgtcatataaaaataaaggtacgacaatcaatttttgatactgtctcgcaatatcttctaaatcatgtataaaactaatctcaccatatagcgttctcgcataagtaggtttattaatctgcaaatgttgaacgcatgtctgtaactcttcatgtgcttttgtaaacttgccattaatgttgccatgcgcaacaacgacaacaccgacttgttgttcgtaacctgctaatgcgtcacaaatacgttgttcaattaatcgtctcattaaaggatgtgtgccaagtggctcgcttacttctacctttatgtctggataccatcgtttcatttcatgaacgatatccggtatatccttgagataatgcatggcactaaagagaagcaaaggtacaaccttaagctgtttaacgccactttgaatcaacgttgtcattactgtttctaaatcctgatgctcactttctaaaaatgcaatatggtaatgatgtatgtcatcttttactaattcagatataaacgcttctaacgcttgattctgccgaccgcgcctcatgccatgtgcaacaatgatattcccattcacatttaccaaccctttcacacgtattgtataccaaatcatttcgtttttgtgaaaagaatcacattataatgtaaaatcagggaattccctgatgcctgtagtcatgcatattccttataaattttccctttttgttaaatcaaaaaagcgaccatatatgaatccctactcaacatttatttgagcaagcatcaatatatcggtcgcttgtagtgtatattattatcttaaaatggtggttggcctaatattgtttcgtcaaagcgctcgggtatcaatactttgcgcatgatcacacctaaatcgccatcatcattttcatgttcgctgtatatttcataacctcttttttcataaattttaagtaaccacggatgcaatcttgcagatgtacctaaagttacagcagctgcctttaatgtatctcgtaaaaatgtttcttcaacataagtaagtaattgactaccatagcctttcccttcatactcaggatttgtcgcaaaccaccagacaaaaggatagcccgaaatgcttttcacacttccccaaggatatctaaccgtaatcgtagatataatttcatcatcaattgtcatgacaaatgtagtatttttatctatattttctttcacagcatctaaatttgcatttaccgaaggccagtcaattccaagttctcttaaaggtgtgaatgccttatacattaactgatgtatcgtttctgcatcgttttcattcgccagtcgaatcgtcgtatttgccatttgaatccacacactttctgtttattttaaatgaatcatctttaattttagctatgcttaccttttatagcgtaccaacatttagcacatgtgtcagataacatgcctcattgatataagataagtatatgatcatcaattatttcattattgaaagcaaagtaaaagtctaggacatgaattaatgatatgtacgcttcaaagctttcatttttcaatgtctactttgaagcgtgcagttcataatgtcctagactctacaatgttatattggcagtagctgactgcggagcccaacatagagaatttcaaaaagaaattctacagacaatgcaagttggcggggcccccaaaaaggatgactctaaattcattgttgtcacaacatcttcaattatgactccattactgttgctctaaacgattgcgtttaccatttaaaaatgcataaacaagtcctacaaaaataccgccacctacaaagttaccaaggaatgcaaaaacgatattttttaatacatgtaaccaagatacagcatcaaagttgaagaacaccatacctgcatataaaccagcattgaatacaacgtgctcatatcccatgtatacaaagactataacaccacaagcaatgaagaatgcttttgtcaatccgcctttgaattgcatagaaataaaaataccgatattaataaagaaattacagaaaataccttttgtaaaaatattcaaccaagtcgaatcgactgtctttttctgaactaaggcagttaaggcttgtgtcatttctggtgtcataacatgtgcatatttcattaagaagaataatacaaaaccacctaaaatatttccaaggaaacaatataataaaatccacatcatcttattaagagaaacaactttataataccagccaactgtaaaatacataaaattacttgttaataattcagaattcgttagtacaaccaagaccaatcctaagctgaaagcaattgctcccattaaattaatgagaccatcaacatgtgtacttgcgaattgtgttttaataccaaacataaaaacagtaacaatggacaataagaaacctgccatcatagatttaagcatgtatcgtcctggtgtttgctgtaccatcacttgtttcatttgaacagatgatgatattgagtctacgattgctttagttgaatacgtatcttcaactgttttattattttttatcacagcacttcccccatttactattatcaaataaattttacctattaattatattagtatttagatgtaattcatagattaaaattcagaaaattctttttaccaattcaaaactaatatttactcataaaaatagcgagatagatatcgcgacataaaacaattggtatcattttaattgcgctcatctcgctttatgtaagtattacttattcttttttaaatttgaaaagtaatgtaaaccatatgcaaatataccgtagcctacgactgtacgcaaaataaatctaacaactttatttggtacacatttcgaagtaacagtaattgaagataaaagcgttgtaaaaatatataatattaatactttaatgtaacgttgtgccatcgaatcacccttcattcaattaataatattacgttattattataaactgaatggcatataaaattttttacatattttcaacaactttatttcaataaagcatcaagttgatctaatgtttgattcatcccttgctcaacacccatgtttatgacttgttgagcggcttcttttgttggaaataccgatgttgatgtcactgtcgttttcgctgtattgttctcggaaaatgacaaagtaatcttcatgcttggcattttcgtatcttttgcaccttgaggtgtcgcaaatgagtcaatatattcaattaaatatggacgcttaaccgttttatattctgctaatgtatagctggtcattgtaggtgttttaatcgcgtaaaatgcatcaccgcctgaaaccgcattaaagcgaaacactttggtactagcgtcttttggatgaaaccatttttcaaataatgcttttgtcgtataggcatcaaacaccttttcaatcggtgcttctatcgttcttgaaaaaataattttattatcttcaactttaatcgtcatcttcccactccctatcttttatatttactcatcttaacatgcattgagtgacatatgttaccaaatcatttgttataaactatagtaatattaatcattttctctgttgaaattgataactacgaaataaaaaacacactctattcagctattaacagttgagtagagtgtgcaaacctgttgaattaatgcgctaacatttcttctttgatttggtctttatttaattttgaaggataatatgttggccagttatccatttcttttaataacgcgtcattatcattacccataaagatatggaagtgttctgcctttttaggtgcaatgttgtgatcgctaaattggatgaatttcggtaagtctttatcattaccatcgaccaatttaaacataaatctcacgccacggttacctttaggatatttcaatgttttcttaccattgtattcatatttaccagtgtgtttcttaccatctttagtaaatgtaatttcatttccttttatatcaatgttagtaatatcagttttatatcctttgtcataataagcttttaaatctttagcagatttcttcggatcattttcagctttatgttccatcacttcatcaagcgtaccgtcttttaagtaagggtaaacagattgccattcaccagcataatcgcttaattcacggtctttaacttgctcatctttaaaatacccatcagaaattgctttgtcgtgtttactttcagctttgtcgtctttcactttaacaccactgtctaaagctttaccgatattttcaatattcgatttcattaatgattgatacgtaatattatcttttttctgttgttctttatttaaagactccatgttgtagaattttaaaggcttcgcatctgtttctttacgaattgtttcagtcactttattcgcaacattatcttcataaagaatatattttgcattgctatctctaatttctttaacaattttagttaattctttttgtgatggatcttcagcattcatgttttgaatacctttttgaacaaaaccataacgatcagctaagtatccaattgattcatgtgaaatgaatactgcattaccttgcttatcttttgtaacttgcttcatatcgttatcaattttcttaagatcgtcgtttaattttttgtagtttttctcatagtcatctttatgttttggatctttcttcactaattcatctttaatttctttagcaaaagtttggttaattttaggatctaaccatacgtgtggatcatatccgccatgatgatgatgttcttctttctcatgatcatgtccctcatgttcatgctcttcaccatgttcgtgttgatcagttaaaagctttgctttatctaatttatcttctaaagacagttttttatctttatctttgatagtagatgcaactttcttagcaaccggatctaaattatcccctgtatacataaacaagtctgacttgcttgcacttaatatatctttttgtgttggttcatagctatgtaaatctgtccctgctggatagattgatgataccttcacgtgttttccaccaatttgctctgcaaatgattgcaatggataaactgtcgttttaattgttaccttgccatctttatcttttccatcatcattcccacatgcggctaatgataaagttacggctggtacaagaagtaacatacctaatttctttttcatagtcaccctcctaaatagtaatctttacgttttaaaattatatactcatgctacttaaaatacaagcactgtttttataaataatataaagtcgaatcatactttaggtatttaccacttttcgttttatctaatacatgactattgtacaaatatgatacaaaaaactttatagtatttacgaacatcataatataagaaaaaagacaatctctatcatattgctaatagaaattgtcttttcatattgtcctaataaattggtatcacttacttatctcaacaattaagactatttgattttatcttttaataacttttcataactttcataatcatatggatcttcaactttctcgccattaataaatgcagttggtgtcgtttttatatgattacctttagctatttttttatctttctctgcagctttccaagacttgctatcttttgtcttgtaatcttttataattttattttccgtctctttatctaaatgcagttgtttaatatgtttatctaatagttcttttgttaaccattctttattttcatctttctgcgcagcaaataattgcttttgaaaatctaaaaatgatttaggtgcatacatcaatactgcatgactcgcacgcgaaccaacaattgagtctttacctaagaaagctaaattgacaaattggtattccactttgtgattatctatataatttttacgcaactttggcatgactttttcatctaactctttacaataaggacatttatagtcgccatatatgacaactaatggtttgccgtttttcgaagatgtagttgctgattcttttttaccgcaagctgttaaaattaacatgctcactataaataatgttagtaattttttagtcataataactcctattcatatctagttcgtcatattttcttcatgataatccgcatcatgttgctgataatatcgtctcgaatcaaaaccttgcttatatgatacacgtttatcactaaaatcatatgcataataatgcacttcatcatcattactcaaaggtttataagctaaaatgataattttatccttatcatagacataaatattagcatctttgcgttcaaaatgatcaacacgatcaccgttgccttttttggcaagttgttcttgtttttgattttgaattttaactgcttcatctatttctttcacatatttatcattaccacatcctgatataaagactagtaataataataccgtcgccacaaatcgcttcaatgctcccactcctactatcaacttccaactaactttcaatataattaatactatacaccgtcaaacatcaatgcgctacaactactaccaatgcatttaatataaatatccaaagaaataacagttatgtatagtcaaagaaaaatatatttcattttctatgtgtatttgcaatcaatttttgataaaataaaaaaatagcattatatataaattcaaaaattacagttcaattcagagagggatgggataaaatgaactttgtaacgttgacttcggatgagttcaatgcgtttacaacaaagcatttttcacattacacacaatcagctattcattacaatcatagagttgatttaaaaggcgatgtgcatcttgtaggggttaaagatgacaatggtcaagtgattgcaggatgcttattgacagaagcacgcacacttaaatttttcaaatatttttatactcatcgcgggccagtgatggattatacaaatcaatcattagtagcatttttctttaaagcattaacgtcctatttaaagaaacaaaattgtttatatgtccttgtagatccatatttaattgaaaatttacgcaatgcagacggtgaaattgttaagtcttatgacaaccgagcatttgttagaacaatggacacattaggctataagcatcaaggctttccggtcggttatgattcaatgagtcaaatccgttggttatctgtattagatttaaaagataaaacagaagaccagttattaaaagaaatggattatcaaacgagacgtaatattaaaaaaacatatgatattggtgtcaaaactaaaacattaacgattgatgaaacgcaaacctttttcgacttattccatatggccgaagaaaagcatggtttcaaattccgtgagttaccatactttgaagaaatgcaaaagttatacgatgaccacgccatgttaaagttagcttatatcgatttaaacgagtatttaaaaacgttacaattaaagcaacagcaattaacagctgaactctcaggtgttgaagaggtattggaagaaagtcctaattcaaagaaaaataaaacgaaacgcacacagctagaacaacagctgaatagcaataagcgtaaaatcgataatacaatagaacaaattgaacaagacggtgcagtgttaaacttagcttctgctttgtttatctacaatgagcatgaagtttattacttatctagtggttcaaatcctaaatataatgcttatatgggtgcctaccatttgcagtgggaaatgattaagtttgctaaagcgcatcatattaatcgctataatttttatggcattactggtgatttttcagagtcagcagaagactatggcgtacaacaattcaaaaaaggatttaacgcacacgtagaagaatatattggtgattttattaaaccaatcaaacctatgctttacaaattacaaacatacttaaaacataaacgccgttaacagtttatgctgtaacatctagaatataacaaagaaccacgcatcatgtatatggcatcatcgccatattaaaacatgatacgtggttctatttgtttattcttcattaataacatttaaaaaacgttttagttcttcagtttttggattgttaaaaatctcttcaggtgccccttgttctcctatttcaccttcatgaatgaatacaatgttattagatacttctctagcaaaacgcatttcatgtgtcacaatgaccattgtcatgccctcattcgctaaatctttaatcacctttaacacatcattcacgagttcaggatcaagcgctgatgttggttcatcaaacaacatcactttaggattcatagctaatgctctcgcaatggcaacacgttgctgttgaccacctgataatgcatgaggtcgttgatctttgacatgtgtcaaaccaactttctcaagtaattctagagatttctcacgagcttcagcctttttcaactttttaactgtaataagaccttccattacattttctaatgccgtcttatgcggaaaaagattatagctttgaaataccataccagattgtttacgaacttctatttgtgattttttatctttagatgtatatgttttgccgttaacaaatactgtaccttcagttggaatttctaacgcattaatcattcgtaacaacgttgttttacctgacccagatcggccaattaaggttacaacctcaccttttccaacagataaatcaatacctttgatgacttcaacatcattaaatgatttatggatattgttcaattgaatcatgagcgataccctctttcaatataagattcatagataccttggattattgaaataataaagcataccacccagtacattagcgcaactaacacataaattgttaaatattcatatgttgtagacgcaacttcttgagcttttctaaacatttctgctactaaaataaatcctagtaatgatgtatctttgattaaacttaaaaatgtattacctagtgcaggtatagatactcgaattgcctgcggtaaaatgatgcgttgtatcgtttgacgatatgtcataccaatagaatatgcagcttccgtttgtccttttggtatagaaataataccgccgcgaataatttctgaagcatacgcacctacatttaatgacaagccaataatggcagcgaccacaggtgccaaggtccattgattatctgcatcattggttaataatctacctaattctggaataccataaaagatgataaataattgtactatcataggtgtcccacgaataatagatacatagacacgtgcaatacttcttaaaactttactcgttgaaatgcgcatcaatgctgtaaataatgcaatgattaaccctaatacaaatgttacgagggtaatcggaattgaatatttcaccaaaccttcgagcataggcccaaaagcttgttttgcagcatcaagtgcatgtagttgttcactatttagatttagaaacatcttgaccaaaccatttcttacctattttagctaattcaccgttttcctcgatttttttcaagccatcattgaatttttgaactgtttcgtcatccacttttttagaaaatgcaaatgcagatttactttgttcagcgttacctttgattgccttgatcttagcattaggtttttgttttttataatccaagtatgacagactgtcattaaatgtaccatcaacacgcttagacaataataaatccattgattggttaaagccatcaacttttgtaatatcagcacctttatccttagctaatttaccataattagatgtgaatgtttgtgctaacttcttacctttaacatcatcaaaatctttaatatctttttcattttcacgaataactaaaacagcacttgagaatgtgtaaggcttagaaaatttatatttcttttctctatcaggattaatacccacttggtttgcgattacatcaaaacgccctgcgtctaaacctgcaaacatagagtcccaagaagtttcgttaaatttaagttttaatccttctgctttagccactgctttaataacatcgatatcataaccagttaatttaccatctttatcatggaaactaaatggtgcataagtcccctcagtaccaacattaattgtcttactatctttactagcttccttgtctttagacgaattgttcccacatgcagctaatatgaaaacgaaagctatcaccacaaataaaagtcttttcatagaatatatctccttattcttattattctaatcggaataaaaatattttaatctgaatcgccagataagtcaatatgttgaacttttgctaaaaagcgttatatagctagcaacttatatttattgatgtgaatcaacttcttttttctttccttgtaacataaatgaacaaaagaaactaatcactgtaatcaatagcgcaaataaaaatccagcgtgataaccatgtaacatcgtatcaattttaatttgattcatcatctcaattttgttcatgccattatagtctgacattgttggcgaaaagtttttacttgcatgagataaaatagtaattaatgcagctgttccgatagaaccagcaatttgttgtactgtgtttgtcatagatgaaccgtgtgcattcatttctggctttaattgattcatcgtatgggtcattactggaattaatcctaacgcgataccaaccattcgaatcgcataaactgttgccaacatgattgttgatgtttgttcatccattacaacaaaataagccgtagtaataacaacaatcgccatacctactaaagcaagctttctaggaccaaacttttcatataaagcacccgaagtcatcgacataaatgccataacaattgctcctggtaataaagttaacccagaatctaaagctgaacgatgcaataaattttgcacaaagataggtaaaatcgtttccgaaccaatcatcgataccattgtgacacccataataatgataccaactgtaaattgtttatttttaaatactgcaaaatttaataatggtgttgatagccgatattgacgtaatacaaataatgcgactaaaacaataccaccaatcatagatactaatacgataggattatcaaaacctttttctgaaattgaactcgttccatacaataacccgccgaaacctagtacagaaaaaatgacagaaataaaatcaataggtactttaattgtagttccaacattttttatcgttttaaatccaattaaaaatgtcacagctgcaattggagcgacaacatggaaaagcgatctccagttaaaatattcaacaaggtaacctgaaagtgtaggtccaatagctggtgctaaaccaattaccaaaccaaatatccccatatatttaccgcgttcatgcggttggaaaacatccaatatcgttgtcatcatcaatggcatcataatacctgcacctaacgcctgaataattctagcaactaataatgttgcaaagtgcggactcaaaccgccgagtaatgtacctaaaaaaaagatagaaatacccactaaaaacacttgtcttgttgtataacgttgtataacaagcgcggacaaaggaataacaatcccattagtcaataaaaaagctgttgtcagccattgaacttgtgtatatgaaatttcaaaatctttcataatacttggtaaagccgtcactaatagtgtttcatttaataatccaaaaaatccacccatcagcatagtaataatcatcgttaatttttgtttcttcgacatttaaagcttccccctcaccatctaaaaaacgacacacatttttagatatccggtaattatacccattttcaaaaaaaatagcacgactttattacaatttctttaaaacgtaatcattactatttacatgtgagtagttatcggtcataatatatttacaaggagggatagagatgaaattagatttacagactgctcgtcgtaatttaaatagccctaacattaaaacaagaaagcgtgctttaaaaattattaagcaacacaaaagagcgaaataattgttttaatttgactatattgtatgtctaactatattttcgagtatccctagctcgttaatataaactctatacttaactatttccttacattacttcacatatttaagagctgcatatacactcactccttgtgtacatgcagctctttttttataagtagtatttatctataacttctaaatcatccgttaattcataaacaagcggtgcacctgttttaatttcataattaatgatatcttcatctgacacatcttcaagatatttaatcaatgcgcgaattgaatttccgtgtgcagaaactaataccgtttgaccatctagcaaatattgtgaaatatgatctgtccaaaatggtatcactcgaactaaagtatctttcagactttcggaataaggcatcatacgtttatctaaatgattatatcgacgatcagctaagtaagcttcacgttgttcttcggtttcagcaggtggtttcacatcataagaacgacgccaaatatgtacttgttcctctccaaattcttttctagcatcatctttatttaagccttgcaatccaccatagtgacgctcatttaaacgccagcttttatatacaggaatccattgttgtttagattcagttaaaatataatgcgttgtatctaaagcacgtgttaataacgatgtaaaagctacatcgatggcaatgttattttctcttactttttcacctgctctagtcgcttcattaataccttgttcagataaattaacatcttcccatccagtaaataagtttttagcattccactcgctttgtccatgacgacataaaattaattttggcataacttataacctctttcctttaatctttaggacgttatttcagggatattttaagatgatttaatcttagcaattttcttttcaatatgttttaaaattcaatgattaaatcaattatcactagacattaaatacataaatcctattccccattttcattttttaattcataaatgaatcaataaccacctaataacaaatcatattatacacctttgtccgtcatttttctaaggtttaaaaaatatttttaggtgcacctaaaaataaatgtaataaaaacgcctcctcagatatttatatatctatgaagacgtttaaatacattatagatggtctggttctgggtgaacgtatactgaggaaataccttttttgtgcaaatgatgttcgacattatcacaaatttgatgcgcttctactaaggaaaggttagcatctacaacaattgtgacatcaataaacacactacttccatggtaacgccctttaatacttttaacttcttgtacttcatcaacttctaaaatatcattgcgatacgcttctaattcagtttcattgaaaccatcactcaacataaaaattgcttctttaaaaataccaaaaccagtataaacgattagtaagcctagcaatgttgctaaaataatatcgacaattgggaaaccgatttgcgtaaaaattaatcctatcgccgttccaatgctgactaaactatctgataaattatctttggcagcagaatttaaagaactacttttcgttcttttcgctagtctttgattgactgcaaatacaatcaacattacaaggccactgattaagctgacgataattgttattgcgttaggtacaacgtcatcttctttgaacaaacgaggtgcattttgaataactacttggatacctacaaacataatgacaaatgacaccaataatgaagaaatattttcagacttcaaatggccataaggatgatttcgatcggcaggtttaattgaaattttcaatccaataataacagctaaagaaacgataatatctgtcatattgtttaatgcgtcggctcttacagctgcagagttaaagacaaaacccgtgacatacttaacaatagataagattatatatacaattaaactcaaataagcaccgcgttgcgccaatttaagattttcattatgagacatgcgttgaaccaccttgaattagtatagtaacaatattatgaatgatttattttaaatttacaacgtttttaatttttataaatttttataaaaattaaactaatttattcattcgcaacccctaaaaatattttttagcctttcttcaaatttatttgttagaaaggcttatgcagttgacgttttacgtccaactgcgttccttcgtcttcttcaaatttatttgttagaaaggcttatgcagttgacgttttacgtccaactgcgttccttcgtcttcttcaaatttatttgttagaaaggcgcccaactctccctgcttgttaactttcgcctcgaaagtttctatgttgggaccctatgcattagttgcgaagctatctaatgtagtggtctaattatatagaagaaaaagtgcatcagtgacaaattaaatgagatttctactctaccaaactctcttcgaaagacagttttctcctctatttattagcaaaatattgcatttcttcatatagtacttccttacttaaaatacgctgaatgttctgaattaaacgcttttttacatagttaacactagttaatctattagttaacattagttaataattagttaatttccatttgtattctcatgtgataaattctaaaagcatacaataaatttaatatgtaaaaagaaagggaatacacatgaaaaataaatatatctcgaagttgctagttggggcagcaacaattactttagctacaatgatttcaaatggggaagcaaaagcgagtgaaaacacgcaacaaacttcaactaagcaccaaacaactcaaaacaactacgtaacagatcaacaaaaagctttttatcaagtattacacctaaaaggtatcacagaagaacaacgtaaccaatacatcaaaacattacgcgaacacccagaacgtgcacaagaagtattctctgaatcacttaaagacagcaagaacccagaccgacgtgttgcacaacaaaacgctttttacaatgttcttaaaaatgataacttaactgaacaagaaaaaaataattacattgcacaaattaaagaaaaccctgatagaagccaacaagtttgggtagaatccgtacaatcttctaaagctaaagaacgtcaaaatattgaaaatgcggataaagcaattaaagatttccaagataacaaagcaccacacgataaatcagcagcatatgaagctaactcaaaattacctaaagatttacgtgataaaaataaccgctttgtagaaaaagtttcaattgaaaaagcaatcgttcgtcatgatgagcgtgtgaaatcagcaaatgatgccattactaaattacaaaaaaatgattcaattgaaaacagacgtttagcacaacgtgaagttaacaaagcacctatggatgtaaaagaacacttacagaaacaattagatgcgttagtggctcaaaaagatgctgaaaagaaagtggcgccaaaagttgaggctcctcaaattcaatcaccacaaattgaaaaacctaaagcagaatcaccaaaagttgaagtccctcaaattcaatcaccaaaagttgaggttcctcaatctaaattattaggttactaccaatcattaaaagattcatttaactatggttacaagtatttaacagatacttataaaagctataaagaaaaatatgatacagcaaagtactacactgataaatattttaaatataaaggtacaatagataaaactgtactatcagtttttggtaatggatacaaatcatacatccaaccattaaaagttgaagatcaaaaaaattatgtatctaaatcatatgcacaagtaagaaactatgtaactgaaactttaaacacaggtaaggtattatatgcattttatcaaaatccaaaagtagttaaagctgctataactacagctgaaactgcatcatcaatcaaaaatacattaagtaatttattatcattctggaaataatcaatcaaaaatatcttctctagttttacatcattttttaaataattttcgtaataaaccgtgattaaaaagaaccgttgattctcaatcgaatctgcggttcttttttcattttccatcaattaaatgcttcttcgctatttgtcagctcacttttttacctgcaacttgttaaataatccttacatcgttaacgaatagttcatcatttagttgaatcagctcaactttattaacttcaaaatttcacaaactattgcacaatccattcctctaccacttcaagcaccttaattaaacattaattaaatagaataagacttgcaaaacatagttatgtagctatataaacgcctgcgaccaataaatcttttaaacataacataatgcaaaaacatcatttaacaatgctaaaaatgtctcttcaatacatgttgatagtaattaacttttaacgaatagttaattcgaaaacgcttacaaatagattattatatatatgaacttaaaattaaatagaaagaaagtgatttctatgattaaaaataaaatattaacagcaactttagcagttggtttaatcgcccctttagccaatccatttacagaaatttctaaagcagaaaataagatagaagatatcggccaaggtgcagaaatcatcaaaagaacacaagacattactagcaaacgattagctataactcaaaacattcaatttgattttgtaaaagataaaaaatataacaaagatgccctagttgttaaaatgcaaggattcatcagctctagaacaacatattcagacttaaaaaaatatccatatattaaaagaatgatatggctatttcaatataatatcagtttgaaaacgaaagactctaatgttgatttaatcaattatcttcctaaaaataaaattgattcagcagatgttagtcagaaattaggctataatatcggcggaaacttccaatcagcaccatcaatcggaggcagtggctcattcaactactctaaaacaattagttataatcaaaaaaactatgttactgaagtagaaagtcagaactctaaaggtgttaaatggggagtgaaagcaaattcattcgttacaccgaatggtcaagtatctgcatatgatcaatacttatttgcacaagacccaactggtccagcagcaagagactatttcgtcccagataatcaactacctcctttaattcaaagtggctttaatccatcatttattacaacattgtcacacgaaaaaggtaaaggtgataaaagcgagtttgaaatcacttacggcagaaacatggatgctacatatgcatacgtgacaagacatcgtttagccgttgatagaaaacatgatgcttttaaaaaccgaaacgttacagttaaatatgaagtgaactggaaaacacatgaagtaaaaattaaaagcatcacacctaagtaaacagttcaatcattttataaaatcctgggacacttcatacttgtctcaggattttttaacatattgaatcagcctcataacattaaattatttaatcgtacattaaatttaataataacaactgatttttataagaacaaagtatcgcatcatagtagatacacaaataatacaaatgaagcaatttaacttgaaagcttaaataaatattctcaagttaataaataattaacttttagatggattcatcaaaaatcgcaaaaaagaacaatttgtattttacaaacattaattaaaaataaaagcaagacattcgtgcaatcggttgccttaaaatgtttacaactgtcaacaataccaaggttttattaactatatttctcacaaaattagcttttagcattccaaacaaaaaaggttaaattgaacggaattatggcatttttaacttaattgtaaaaaaagttgataatggtcaattgttaatgaacagttaattataataacgttcaaaatatattattatttaattaagttaaataaaattatagaaagaaagtgaaacttatgcttaaaaataaaatattagctacaactttatctgtaagcttacttgcccctcttgccaatccgttattagaaaatgctaaagctgccaatgatactgaagacatcggtaaaggaaacgatgtagaaattatcaaaaggacagaagataaaacaagtaataaatggggcgtgactcaaaatatccaattcgactttgtgaaggataaaaaatataacaaagatgctttgatcttaaagatgcaaggattcattagctctcgaacaacatattataactataaaaatacaaatcatattaaatctatgcgttggccattccaatataatattggtttgaaaacaaatgataaatatgtttctttaatcaattatttaccgaaaaataaaattgaatctacaaacgtaagtcagacattaggatacaatattggtggtaatttccaatcagccccatcacttggtggtaatggatcatttaactattctaaatcgattagctatacacaacaaaattatgtaagtgaagtagaacaacaaaactcaaaaagtgttttatggggcgtcaaagcgaattcattcgccactgaatcaggtcaaaaatcagcatttgatagcgatttatttgtaggctacaaacctcatagtaaagatcctagagattatttcgttccagacagtgagttaccacctcttgtacaaagtggatttaacccttcatttatcgcaacagtatctcacgaaaaaggttcaagcgacacgagcgaatttgaaatcacttatggaagaaatatggatgtcactcatgccattaaaagatcaacacattatggtaacagttatttagatggtcacagagtccataatgcatttaaaaatagaaactacactgtgaaatatgaagtcaattggaagactcacgaaatcaaagtgaaaggacagaattgatatgaacatgaataaattagtcaaatcatccgttgctacgtctatggcattattattactttctaatactgcaaatgctgaaggcaaaatcacaccagttagcgtcaaaaaagtagatgataaagttactttatacaaaactacagctacagcagattcagataaattcaaaatttcacagattttaacattcaatttcatcaaagataaaagttatgataaagatactttagtgcttaaagctgcaggtaatattaactcaggttatgaaagaccaaatcctaaagactacgacttttcaaaaatatattggggtgcaaaatacaatgtgtctatcagttcacaatctaatgattcggttaacgtagtagactatgcacctaaaaatcaaaatgaagaatttcaagttcaaaacactttaggatatacattcggtggtgacatcagtatctctaatggtttatctggcggacttaacggaaacactgctttttctgaaacaataaattataaacaagaaagttacagaacaacattaagtcgcaacacaaattataaaaatgttggctggggagttgaagcacataaaattatgaataatggttggggaccttatggaagagatagcttccacccaacatatggtaatgaactcttcttagctggcagacaaagcagtgcatacgctggccaaaacttcatagcgcaacaccaaatgccattattatctagaagtaacttcaatccagaatttttaagcgtactatcacacagacaagatggcgctaaaaaatctaaaattacagtaacttatcaacgtgaaatggatttataccaaattcgttggaatggcttctactgggcaggcgcaaattataaaaactttaaaactagaacatttaaatcaacatatgaaattgattgggaaaatcacaaagtgaaattgttagatacaaaagaaactgaaaacaataaatagctagtaaaacacggtcgccaacagtaattgtgacgaccgtgttttgatttattatcttagtaagactgccattctttttctcaaggtgagatataaaggaatagctacaattaaagtgaatattacgcctggaatcgcgtttaacaacactacccacacaggtaaatttaaaataatagataatagtagcctagataccaaactgcctaatacacttgctaaaactaatgatagtacatttattttcaataaataaacaactgcaatagctataactctaaatataatagaaataatcacattaattggattaaatacgccaaatatcagtaataatacgcttgataaaagcccacctaaaaagtactttttaattccaaagaaagctaatatcaataatgctgctggtgcagataattgaaaatctaatcctggtataatggatggtattttcaaaactgccaaaatggttaaaatcgcagcaatgacactaatttgagtaatatcttttgatgtcatactaaaacccctataccgtttcataaataacttgcttcggtgtgctttctaaaaatgatatgtaatgatttaaatcaatacgatcgtccacaaatattattctgcctccatatctcgtattaactggtttaatatcaaataatcgatggtaaccaattttagcagaggcaaaataacctgtcgtatacgttaagtcatcggacacgcaaagttctcctttgacatacggatgcgcattgatacaactagcaattgctaaggcatcagtcactctttcattaagatcacctttattatttatatcttcaaacgaaaaatgtgttgccctaatccccctttgtccaaatgaatctaaacgtttaccagatatagcagatagaataatagctcctgtataaaccgtttcatttttaatatatgtcatcccttgatttagcgcttgttcagttacaccacattcttgtgttaaatgttggagatttgctttatcatcatcaataatttgtaatgcttttatttgttgaatcggttccatgattttttgtatttttatattgagaaaatccggttgcccattttcatgaaaaaaacctttattataaaacctttgtaccgtctgttctattttgtcaaactcacaaatcgtttcagcaccactaatatgaacatcttgattgctagaacgcatttttatactatacatgacgatcacctcaatcttcttgatgcaaaatttcaaacaacctatctatatcttgttcagcatgaaaatacgacaatgatattcttaacattggcttagtcacagttggataccttaaataacttgtaaacacatgatgctttaataatgtttgatgaatgttctcagccgcttctatgtcatcaaactcaataaacttaatcggcgagtttgaactattataattaacattgagtgcttttaacttttggttaaaatatttactcaaactatttaatttagtgcgtctatcatcagcatttattaacttttcaatatttctttttataaaatacaaattataaattggcaaactacttgagtagatgagtggtctaccgtgattaattagcatatccttcacatcatttgaacttaaaatcacacccccgtatgcaccacatgctttagataaactagaagtgagtatatctatgccttgataattcgagtaattctctattccaaaactatgtgaaacatcgagtatcagtgttgcgttatatttatgctttaatgagactaattgaccaatatccacaacgtcgccattcgttgaaaatacactatcagatatgattatttttggtatattttgattagggtattccgctaaccttttttctaaatcagcaatatctaaatgcttatatatcactttttctaaaccacttagcttaataccgtcaataatactcgcatgattttcttgatctgaaaatacgacacaatttgtatttttgaaaatattaaataacgccaaattagcatcataaccactatttaagatagtacatgcactatatccgagccagtctgctaacattgattcaatctcttcataaactgtcgaacttccactaatcaatcttgaacttgataagtgataactatacttccgcataaaactttcgaaatcgacttgatcaaacgctatttgacctaatcctaaataatcattagatgtatagttcgtacatcgcttattttctacttcaatatactgtctatctatataccctaccgatttaagcgaccgatataaccctttctgttgtaataaatcaatttgctcttgaaacatcattcttgttttccttattttcacaagtgccataatcaatttcaaagcccaaatcattaatcatatcgtagtctaattggttcggttgtccaccagtaattagataatcaccgacaaatattgaattcgccgcttttaatgctaatggctgtaacgaacgtaagttgacttctcttcctccagcaatacgaatttctttcgtaggattgattaatcggaataaagctacaattcttaaacatttcattggtgttaaatcatccatgctaccgaactttgtacctttaattggatgtaaaaagttaatcggaatactgtcggcatccatttcttttaaagcaaatgccatatcaacaatatcttgattagattctcccataccacaaatcacgcctgaacatggtgatatattattcgctttcattagttctatcgtatctgttctatctttataactatgcgttgtcacgacgttatcatggtaattttcacttgtattaatattgtggttatatctgtctacaccagctgacttaagtttcttagcttgttcgtcattcgttaatcctaaacatgcacatattttcagttgcgggtgttgagatttaatcgttcttacagtgttactaatatgatcaacttctttatcactcggccctctaccactcataacaatacaatatgttccaatatgattatcatgtgccacctttgctccatcgataatttgttcctctggaattaaagcatatcgctgtttttgtttaatatctcgtgattgtccacagtacccacaattctcaggacatataccacttttagcatttaaaatcatgtttaattttacttttttaccgaaataatgttttcttaaaatatacgcctcatttaataaatctaaggtatcaatattagtatcctcataaattttcaatacagtctcttttgttaattgttccccttgtaatatgcgtttagccaaattcatattaacacttcctatctaaaatgttatgtactgcctttttaaaaatacgtaccatcgttttcacttctttatttgacatacttaacactggcacaaacgtaatgacattttctaaatttctaatcattagcccgttttctttacaattacgtacaatacgttcaactttttcaatttctaacggcgttttactatctttatctgtcactaattcaactccaaacattaagcctcgtcctcttacatcaccaacatttcgatgacgcttcagcgcatgtaactgtttctcaagtgttgatgatgtcgtttcaatatgtgacaataacttacgtttttcatatagtcttatattttctaaagcaaccgtacaaacgatttgatttccggtgtatgtatgtccatggaaaaaggtattcacaccatgcgaatcacttaaaaatgcattgtatattttttgagatgtcaatgtagctgcaagtggtaagtagccacctgtaatcgccttacctaaacacataatatccggttgaacatcttcatgattgcatgcaaacatctttccagttctcccaaaaccaactgctacctcatcacaaattaataagacatcgtattttttgcacaatttctcgacttctttcaaaaagcctttaggatgaacaaacaagcctgtcgcaccttgaatcaacggttccaatataaaccctgcgatttcatcatttctttcaattagaatttgctctatattcgttaaaatagctgccatcatttcattttcagtatcgtaattactgcgatagaaagatgggctttctacttgaatattctcaaatattaaatctttaaatattttatgaaaggtcttgataccaccaacacttaccgcaccaatcgtatccccatgataaccgtgatttagcgttataaacttgtttttcttggcatatttttctctatcaatatttttccaatactgatatgccatctttattgcgatttcaacagacgcactgcctgtatcagaataaaatacttttcttagattacttggcgtgatttcgattaatttttccgcaagttctattgacggaatatttgataatcctagcagcgtagaatgggcaattttattgagttgctttttaattaccttattcaagtatttgttattatgaccatgcacattgacccacaacgatgcataaccatctaaatatttattgccattcgtatcgtaaaggtaactaccctttcctttttcaatgatgattgcttcttctttgctatatacacccatttgtgtaaatggatgccaaacatattctgagtctttttgtttaagttgttgtgtgtaattcatttttaactcctattaattgctttaaaaatgcttctgagaaattttcatacgtggcatgttcttcaaatgtatagactgttttatttgttaattttccaatcgtcatttgattgtctttttcaatataactgtctgtatagcgattcatgattaaaaaatttctcgccgatacattatgattaacataatcttggtgaacaatggcatcgctaatagcacctaactttgatggcaacacactgatgacacaatctgcacaatcattgattaaatctttagtcatatagaaatcatctgtaccttcatatattggtacgccaattcccccagcaccctcaattaagataaaatcaaattccttatctaaaacttttaccttatctaatacacactgcttatttagaaaaatttgatctgccattttaaatgcaaggtgtggtgatacaggttgcttaaaagtataaagtgacgttatgtcatagcttaaatcacattcatttttaaatacttctaaatctggaaacgtcccgtcttggcgttcctcagtttgaaatggtttaaaaacacaaacacgatgaccacgtgttttcaaagcatggtataaatgctttgtaacataggttttgcctacatcagtattcgtacttgtaataaaaatcctcataaaaaataagcacctcaatccaaatgtaaacttttataattaataagtttacatttaaggcgcatgtttttcaagaaaacatgaatttaaacttcccagtataactataaattttggcaaaattttgaccttgctattgaaatgactaaggcttcttacggaattcgggcagatataaacagcgattcgataaaatatgtcagttgaaattaataattgcattatttcttaataaaaagacatcctagctttaccatgttgtgaaacaatccattaattgtaatattacgttgagcgccttgttcatcaatgctataattagttacataataaattgaacatctaaatacaccaaatcccctcactattgccctagtgaggggatttattttgctgttgattatctatcaccctttttatttccaaattctgattccatattaaactattatttataatttccagcctgctgatttactttttattcttataaagtcttgatacattcctggttttcgaattaattcatcatgactacctttttgaattatttcaccttcattgagcactataatctgatctgcatttttaatagtttcaagtttatgtgcaattgtaattactgttttgcctttacttaattcattaattgccgtttgaatcagctgttcattttcagggtcaatacttgaagttgcttcatctaaaataattattggtgcatcttttaatatcgccctagcaatagaaatcctttgcttttctccgccagataaattactacctttttcatttagcattgtttgatatccctcaggtaatgacatgatgaagtcgtggcaacatgcttgcttcgctgcacgaataatttcttctttcgttgcacctggattgccaaacaatatgttattttcaatcgtatcattaaataaatacaccttttgaaatactgcactaattttcgacattaacgtacttaatgtcatatctttaatatcaacaccatcgatgcgaataattccatcatcgatatcataaaagcgcaagagtaagtgacataatgtagatttcccacttcctgaaggtccaattattgctgttgatgtttgtgtaggtatctcaaaattcacattctttatcacttgtttatcatcatatgaaaaattcacgttttgaaaagcgatattttcatttttaatcgtcaaattttttccattctcatccagttctggagcattttttatcttttcaatatcatctatcgtcatatctatcatttcaagtacgtgtgcagcactattaatattttcaacactatcaaatatcacaaatgaaaaaattgaaatcataataagggtaggtaaatcaatactatgattcatatataataagcatgcaactaatacaatcattattgaaacaacttttaaactaagtaaatgcaataaattgaatgggatatattgcatttctatttttgtatttatacgtttactttcattgactgattggttaaaacttttaagactcgtattttctttcgcgaatgattttattacttgaataccacgaataacctccaataccttttccactaattggttttgtacattatgatacgctggcgcattttgtcgactctttctttctaataattgaatcgcaaaaaatgatagtaatacgccaatgcatgctaataatgatacttgccacgaaactacaagtagagacaatatgagtactataattaatatgtatccattaacaacaacgtccaccattttcatagcaaagttttctaaaaaggttaaatctgttgttactattgttgttaactcatttgaatgatgcgaattaaaataacctaaccttacatttttcaatttatcccctatatctaaacgttctttcgcactcatttcataagcgatgctctcatggcttttgcttttgaaatatgctgtaataaatcgtccaatcactaataaaaccatgataattacaacattcaatatatctttcatataaataggtttatgagatagcacattattaaatatttttgcagctaaaaagataggtaacgcaataaaaatagcatttaaaaatgacatgctaaatcctaaaatcattcttgctttatatggtctcatccagtttaaaattttaaatgtaatttgaaacatatttgacctccttttctcattagtttaattatgtccagtattgattccccaatcttttgtatgcatgtgcgtatcccacattttcttataattaccgtttaattttagcaataagtgatgtgaccctttttctaaaatttgttgtttacctaaaacaataatttgatctgcatgttgaatcgtagataaccgatgtgcaataacaatcaatgttttatcctgcgtcaacacatttaatgcttcttgaattttttgttcgttgtctggatcaacgtaagcagtcgcttcatctaatacaatgataggcgcatcttttaatatcattcttgcaatagtgactcgttgtttttcaccaccagacaatttatctcccactgtaccaacattcgtatcatatccatctggcaacttttcaataaattcatgacattgtgctaacttggcagctttttcaactgcctcatccgtagcttctggattgccaagtttaatattttctttaaaagtaagatttaataaaaagttatcttgtccaacaaaaccaactaaatcgttaagttgtttcgattcaatatcttttatatttataccgccaatcgtaatttcacctgaagtcacatcccagtatcgtgatataagcttggcaatggttgacttaccgctaccagatgccccgacgatagctgtgaaattattttctggtactgtaaatgataaatgcttaaagaccagatcgtccttatctttgttatatgaaaatccaacattattaaaagcaatttcataatgttgaggttccataaatcgtgatgacaatgctaactcttctaagattaataattgatttacttcagttaacgcatattggattgattttaaatgatttacataattagtaaaattcttaatcggtgctactacacctaaagataatacgatgcataggaaaaattccgcatagtttaattggttgatagatatcaaatacatgccgaccggtaaaatccctaaaaatgttgaaggtaatacacttgaacctaaattcatatatccccatgtatttttaaaccaattcaaagtgtgaatcttataattatctactgcatctttatattttttatatgaactttgagattgattaaatgttttaatcacttcaatgccttcgataaactctacaatcgcgctattcatataattattcgatttcatttgttcagcatatgtctcattaaatccagacataacttttttaaaagcgaaaattgaaattggtatcgttactaataaggcactagccatacgccaatcaatgagcattatgtataaaaagatagcagctgacaaaagtaagtttcctataacttcaggaatcatatgtgctaaaggtaattctattgtttcaaccttatcgacaaatatattttttaattcacctattttcttagattccactacgcctaaagggagacgcattaatttttgagctaattttttacgaatttcagataaaatttcatatgccgtaatatgtgatagcatcgttgacgctccaaaacaacacacttgtgaaatataagcgattaaagcaataaagatataaaccataatcgaattaatcgtatatgcattgttaatcatcattaaaataattttaaagactgcccaatatggaactaatccagaaaagacactgatgatagacaacaaaattgataacataattttccatttactatcagaagcaaatccgctgagtatctttatccaatttgtctgattgttcatcgtatatgtaactcctttcaattaataatctaaattaagccgcttatattatttatttcactggatgatatacataatataaatttgttatttgttaaaaattaatacttattacaagtacatcatatattaattgataacgattatcaatgtcgcgtggatttgtgacacatttcttttaaaaattcacaatgttatggggcagaaatgataaagagccactaatgatttattatgtaatgattctttatccttagccacagctaatatgtacttaaaaataggaatacatgagtaaaactctatgttggggctccgccaacttgcacattattgtaagctgactttccgccagctactgtgttggggccccgccaacttgcattgtctgtagaaactgtggatccaatttctctatgttgggtccctgagtatagccttgtagagtctagtacattgatttgtatcccaatgtccctataattgattattcgctttatctaatgatcctatgactcaactattaaatcatttttcgaaatacttaattctaatgtaattaaattcatttattgtaatattgcaaaaatacattgcacaccttgttcatcaatgctataattagttacataataaattgaacatctaaatacaccaaatcccctcactactgccatagtgaggggatttatttaggtgttggttatttgtcaccttttttattgttgcgcgttcgtaaccaatgtgcaaaaaacgcaacaagacagccgcttaaagctgaagtcatgatgtcaattaataaattgaacctccgtcatacacctcctctctgcgttaaagtaacgcccgagatgttaggcgaccattatattatatcatttatttattatatttcacgcaatattaaagttcgagtaaagcgttttttagtggtttacgctactttaattactatcttttaaaatccatttagataatataaatgtgatgggtatcgtaataattaaaccagcaaatggcgcaatttccgctggcaaatttagccaggatacaaaaacatataataaaactgtttgtaagcttacgttgacaagctgcgtaattggaaaactaatgaattttctccaagtaggttttaccctgtaaacaaaataacaattcaaataatacgaaatcacaaaagcgactataaatccggtaatatgactaatcatatattcaatgtgtaataattttaacagcaataaatagacaacataatagtttaacgtattaatgccgccaacaatgataaattttaaaatttcagcatgcgtttgtgttagtttcatatgtgtaactcctcaacatcaaaatatatgtataactgcgttctccaacatactcgaatatgcgagccaatccgcttctcttcaaatatgcttatttcaatctttataccctttcacagcaaatttagtcccttcccctaatccttatacgccattataatttaactgatttatcgtgcgactcattagcgctatagacattactttagtttgcaagtgattttatatacaataagagcgacaacagtaatgagaggatgtctactatgcaattacaaaaaattgtcattgctcctgactcatttaaggaaagtatgaccgcacagcaagttggcaatattataaaacaggcatttactaatgtttatgggaatacccttcattatgatatcattccgatggctgatggtggtgaaggtaccacagatgctttaatgcatgcaacaggtgccactaagtatacagtcatcgttaatgaccctttaatgcgacctattgaagcatgttatgcacgcgcagacgaacaacaaattgcaattattgaaatggcggcagcgtcaggtttggatttattagaaaaagaggaacgtaatcctttatacacatcatcatatggtaccggtgaactaattaaagatgcattaaatcatggtgctaagaccattattttagggattggtggcagtgcaacaaatgacggtggtacaggtatgctaagtgcactaggcgtaaagtttactgatgtaaacggggacttattacaaatgaatggtgctaatcttgctcacattgcacaaatcgatataaccaatctagattcgcgattaaaagaggtgacctttaaagtggcctgtgatgtttcaaatcctttattgggtgaaaatggtgctacctatatttatggtcctcaaaaaggcgctgatgcaaagatgataccaaagttggatttcgcaatgtcgcattatcatgataagataaaaatatgtacaggaaaatccgttaatcaagtaccaggttctggtgcagctggtggtatgggtgctgctttattagctttcttcgacacaacattaacaaaaggtattgatatcgtctttgacattacaaattttcatcaaagaattaaagatgcagacctcattattactggagaaggacgcatggattatcagaccatctttggtaaaacacccgtaggcgttgcgttagctgcaaaacaatatcatattcctgtcatcgcgatttgtggcagtctaggcgaaaattatcaacatgtttacgatttcggtattgatagtgcctattctataatctcttcacctagcactttagaagatgtcctacaaaatagcgaacaaaatttattaaacactgcaactgacattgctcgtattctgaaattacaataatgtcaaagtaaatcatcagctttattatttgcagttaaaacttgaatgaggtgaaacccatgaaaagaactgataaataccgtgattcatatcaatacgacaatcaaaaccaaaatcatcgtcgtcaatctgaagacgcatcgtatagacaacaatatgctaaaggcgatcctgaagaacacccggaacgatactataacggtagagattatcgaagagaacaaattcttgaagaagaaaacgagaaatcccgccgttcaaaaaaatggttatatatcattattgccattctcttaattattgtcgctatttttgtcacacgcgccttacttaacaatgatagcgataaagttagtaatgaccctaaagtctctcaaaattataaaaaacaagttgaaaatcaagacggtcaaattaaccagcaagtcgataatgctaaagaaaatattaaaaacaaccaaaaaactgatgacattattaaaaatttacaaaatcaaatcgacaacttgaagcagcaagaacaaaacaaagctgattctaagctaactcaattttatcaagaccaaatcaacaaattgacagaggcaaataatgcacttaaaaacaatgcaagccaaggtaaaattgaaagcatgttaaatgatattaatacaaaattcgacagtattaaatctaaattagaaagtctatttaaagacgacaatagtggtggtaattaattatttcacctttcactaagtatataaataaattaattaagtcctatactttatctgtatcactacgttattaatgatgatacattgcgagtataggactttttatataaacttatattctaactacatacaaatgcacataaaacgtatataatttacataattatataaattaaggagtctgtttatgcaatcttcgagttccaaaacgaagcaattttcatttttattgttaattacgttaggtgtcatgacagcttttggccctctaactatagatatgtacgtaccatcattacctaaagtgcaaggtgattttggttcgacaacatcagaaattcaattaaccttatcattcacaatgattggtcttgcacttggtcaatttatcttcggacctttatccgatgcttttggtcgcaaacgcattgctgtatccattttaatcattttcattttggcatcaggtttgtctatgtttgttgatcaattgccattattcttaactttacgatttattcaaggtttgacaggtggtggcgtcatcgttattgccaaagcctctgctggtgataaatttagtggcaacgcactcgctaaatttttagcatctttaatggtagttaatggcatcatcactattcttgcaccattagccggtggattagctttatccgtagcaacatggcgttctatttttacaattttaacaattgtggcactcatcattttaattggcgtcgcttctcaattacctaaaacacctaaagaagaattaaagcaggtgaattttagtagcgtcattaaagactttggaagtcttttgaaaaaaccagcatttattattccaatgctattacaaggtttaacttatgtaatgctatttagttattcatctgcatcgccatttattactcaaaaattgtataatatgacaccccaacaatttagtatgatgtttgctgttaacggtgtaggtttaatcattgtcagtcaagtcgttgctttattagtagaaaaattacatcgccacatattattaatcattttaactattatacaagtggtaggtgttgctttaattatcctgacacttacattccatttaccactttgggtattactcatcgcattcttcttaaatgtgtgtcctgtgacgtcaattggaccgcttggtttcacaatggctatggaagaacgaacaggtggcagtggtaacgcatcaagtttacttggcttattccaatttatcttaggtggcgctgttgcaccattagttggcttaaaaggcgaatttaatacatcaccatatatgattattatcttcattacagccattctattagtcagtctacaaatcatttactttaaaatgattaaaaagcaacatgtcgcataacacttcaacataattagaaccctagcaaagatatctatctttgtcggggttcttctttatgaattatgagatccaatcttcaattaaaattacgccttcatatcaagtacatttctattcaatcaccctttaacaggcatccaaatttctgtaatatatttttcacttgtagtatcaccatcctgatacaactcaaaaaatggtgctgattttaccgtatctgcttgatattgatgtatgtagtgatgaacctcttccattttttgttgaactgctttaggtactgcaccctgtgcttcaaataccatatactttgaacttgctaatgttatgacatcatatttttcaatatcagcactattatctccggtaactgcaatcatatatgacatcttaccgtctaattcaggtatacataagccaagtatcccggctaaatcaccattattttttaactgtaaatccgcaattactccctcttgataacatctttgccaaaaccctgctatatgttgctgagcctgtcgtccattttcatacgtttctttaatacctactaacgttaacgacgcaagttgttgtaattgatattccattttatcactccattaattttattcacttatgtaaaacatatgtttaggacattttgcattgacgctatataattatattaaatatttattgaatcaatgcgaggactatattatgaaccgaaaaatattaccagttaaacctatcagtcagctatttcctatccctatggtcatggggtgtgaaggtgtttccgcagccatgatgttgcaatacaataaccaacatatccctgctacagaaattatgagacattggccgacacatccgaacaatccacataaaggttatgttggacatcacttattcattaagcttggcaattatcatcaaacgatatttccagaagcatatgtaccatttttacaaaaatacaatcctaatatcgtagacggcactggtaaatccttagaagatcttaaaggtattatcgatcaaggtcaacctgtgttaatataccatactaatcttggttctaaaccattactacgtgttttccgctttgataacaagccagcgaaacaagtttcaaatattcacgtaacgttactcattgggtacgatgattactattactattatatcgatccactttggagtcatattcgtcgtggcctagttttacctgccatcattccaaatcgcaaacaaattattaaaattcgtaaagagaaaatggaatacagctttaattcaccaggaagaaagtgcatttatgtgcaaccacattcatatacaattgaaaatcaacaacaaaataaacacacgtaagtaaacacattactcgcgtgtgtaaaacataaaatgcgcaaactgggtcaggtttgcgcattttaaatttctattatttgtatcgtctcatttatttcctggtaaatatcttctgaacgccattgtcttggatagcctagacacggacagagataacatctgccatcatccatcacacttttccgaaaatgaacatggcccataatactatatggtatatcgaacatcgcatacaaaggattgaaatcacttgtcccaataaatgcattataaaaatcgaatatacgatgcggcataggaacaatgaaatcagggtgcgtcacaacatgtgtgactaaaatcactcgtctatttcctacttctaatagatctttcttcacttgttcagccgctattttagataaattttgatctgatgtgccccaagatattcgttctttatcttgccaagtcgcaccataatgttttcctttttgtaactcatctaatgaaaatcgttgtgctgcaaagctataatcataccaacctgtatgccctattattgcccattcttcatttactataaatggttttgctaccaagcactgtgacatactcttataattattccaaatgtcttgcgtagtcatgctttcaacttcccataaatcatggtttccaggaacaaatttcacaggtatatctaattgttttgtcaattgcgttataaattggtgcgtcaattgataatgatttgagatatcccccgcaatcaacaatatatccaaatttttatacttaactatttcaaccaatgcctctaagtaatcttcggatgtttttttattatgacgatcaatatgtaaatcggcgattgtccctatcttcatacccataccttctttactcaaattaaaatgttatttattatgccatagcttatctaatatatatagttaactgcttcatttagatgattattttatatttttgcacaaaaacttatatcttttcaaaaaatcgataagttttagttatcatacccttagctatcaaatgttttttcttatatttaaaaaaataattgctttattaaatggatttctttagtatttataattaagaaaacgcttacacacaacttttttatttgctttatcctgaggaggaaaattatggcaagaaaattgcatagagagttgaataacagacacatccaattgatagcaattgggggcgcaattggaactgggttattcctaggatcaggtcaaacaatatccttaactggtccatcactgttattcacatacatgattattggggttgtactattcgcttttatgcgcgcattaggcgaattgttgttgagcaatacaagatttaattcatttgttgatattgcaaatgaatatttaggcccttttggtggctttgtcattggctggacttactggttatgttggattgtatcaagtatgtcagacctaactgcgatgggacaatactttgcattttggtatccacaagtcccaaattggattaccgtgctatttattgttttaatcttgattagcttcaacttattaggtgccagattatttggtgaactggagttttggttctctattattaaagttgtcacaattattgcgatggttatcgttggtcttgtattaatctttttctcatttaaaacacattatggacatgcatcattcacaaacttaatcagtcacggcggcatgttccctggaggaacatttggtttcttaatgtcattccaaattgctgtatattcattcattggtattgaacttataggtgtaactgctggtgaaacgaaagatcctgaaaaaaccttaccgaaagcaattaataatgtacctatccgtattttattattctatatcggtggtctattagtaattatgtcagtcataccttggaatgatatcgatccaaatagtagccctttcgttaaactctttacattaatcggcgtgccatttgcagcaggtgtcgttaactttgtcgtgctaactgccgcggcctctgctacaaatagtggtatctattcgaatagtcgcatcttattcggactgtcacaacaagggttaggtcctaaagttttaaataaaacgaatagtcatggcgtgccttatttatcaatgttagtttcatcaattgcattacttatagcagccttgttaaactacattttccctaatgcaattcaactattcatatacgttacaacgttatcaactgtgttgtttttagttgtttgggcaatgattattgtcgcttatctaatgtatttgaaaaagcatcctgaggcacataaaaacagtaaatttaagttaattggtggtaagcctattgcttacattattctagcgttcttcttctttgtattcattttattattctttagtgacgaaacaagagcagctatttatatttcgccattctggtttatatttttatttttcttttataaaaaatacaaaacgaatgctgaaaagctcgcatatgaacaacgacaaaatgacagcggtcatttcagatatgacaatcaataatttaaacatctcgctctagtatcagttcaaccgatactagagtttttttgaaattaacttcattttatcaatataactatgtcattatgccttaaaagtgataaaatattaactattaaaattttgaggagtattgtatggcactattagaagcatttttaatttttatttttgctgtgattattagttcggttatcaataatcgattcccacaaattcctactgcctttattcaaattgcattaggtgtcgttattttcattattccaatacaagttgatttccaattcaattctgaagtatttatgtttgccgttatcgcgccactactttttgtggaaggtacccacgtctctcgaacaaaattattagaatatcgtaaacctatactattaatgtcaatggcactagtgtttgcaactgtagtcggtgttggctattttatacattggatttggcctgccttaccaatgccagccgcttttgcaatagcagcaattttatgtcctactgatgcagtagcagtatctgctattacacgcggaaaattattacctaaaggttctatgacgattttagaaggtgaatctttactcaatgatgcagcaggtatcatttcatttaaaattgctgttactgcattagtaactggtaccttttcattattccaagctgttgaacaatttatcatttcaacaatactaggtgtacttattggtgcaattattggattcgttgtcgttagaatacgtatagacttaaccgctaataaaggtttaaaagataacaataccttaacttttattcaattattaactccttttgtcgtatactttttagcagaagaagttcatgcttcaggtatcattgcagttgtaatcgcaggtctaatccatggtttagaacgcgaccgtttaattagagcacaaacggaactacaaatgaattaccatcaaatttggaacacatttagttatgccttaaatggttttgtatttgttgtattaggttttatgattcctactgtagtcatagatattttccaaacagagcctgacaacttttcatttttaatagtgatcactatattaatcgctattgcaatttatgcatgtcgatttgtttgggtttatttctggtacaaagatttttatttcccgaaaaatatacaatcttatctagacgaggaacatgattcacatgaaacaccaccttctcgtgtgcgttacgcatttattatgaccatgtgtggtattcacggtacaatttcactttcaatggcacttacattaccatttatcattacaaaaggacaagcattcgaataccgtaatgatttattgtttattgcatctttcatggtattaattagtttaatcttagcgcaaattgttttacctttaattacaccatctgccgaagatactacttttaaaggtatgacttatcaatctgccaaaattttcattgtccaaaaagttatcgaacattttaaaaacgaaagtaaaaaagacaaaaacgatacaaattatcgcccagttttaaaccaatactttggagaattgttgtttttattaaattcagaacctgataatcaaaatacaaaagaactcaaacgtttagaagatattgcaaaagtaatcgaaacatctacacttgagcgtttaattgataaaggtaaggcaacatatcaggatattaataattaccgcaatattgtcgaattaacagagacacaccgtactgcatcatttgttgaaaaatttgcaaacttcttcaagatgttatggcttagacttaaagcgatgaagcactacaaagccttaaacaaagaatctaagaagcaagaatttgaaaattcattcaaagatgttcaaaaaattatgcgtattgtgaatcacaatattattttacgcttaaaagaagaacaaaatagtacaaatgtacttgaggttagcttagtcattaatcattactatgatatgagtcgctcattaaagtggcgtgcacaacgtcgaaaagaacgtcaagaaaacagcaatcaaatcataccgcaagctatgttccataaccacaaattggaagcattgtatctacaacgtcatcttttagatgaattaattcgtaaaaataaaatcaacaatatcgttgcagctcaaattcgagaaaatatcaattacaacgaaattgtcttgtctttacagtccaaacattaagcaagacataacaacaccccgtacatatgagacaaagtcattatcatctcatatgtacggggtttttatagtcaacatcaaaaaatcggattgatgaaaagtaaataacctttcatcaatccgatttgattatagaatctatttttttagtttaaatggaattgtacatacgttaacattcttttgataaattaaatacaatttcatacgcaaactagtttgattgtgtaataaattatgccaacgtttcttagtaataaattctggtatcactactgtaatcatatagttttgatcgttggctttacgattaatcttatcgataaaacgtgaaattggtcgtataatactgcgatattccgaatgtaaaataactaatctgacatctgggaaatgacgtttccatttctcttggaatgctttttcatcttcatctccaaatgatacatgtactgcaatgacatcattattcgcaagcatttgtgcgtaataaatagacttatcaactgcagttgtaatgcttgttatcggaacaattgctaaattacgatctactacttctacattatgaacatcaatatcagaacgtaattgttctgcgatatctcgataatgtttgttaattttcaagaagaaaatcaccacgaacggcaagaaaataagtatcggccaaacttggctaaatttagttatgagtaaaatcataaaaacaataaatgtcacgataccaccaagtaagttcacagacaacttacttaaccaattcttaggacgttcatgaatccatttaataaccataccgaattgtgctagtgtaaatggaatgaatacaccaactgcatacaatggaattaaatcttcagtcataccatcaaatacaataattaaaataatggctaatacacctaaaataataatcgagttagagtagcctaagcgatcacctctaacagtaaacattctaggcatatatttatctttagacattgaagccgctaacatcggaaaagctgtaaatccagtgttggctgctaataccaaaatcatcacggtcgttgcctgtacaaaatagaaggcagcattatcaccaaatatttgcatagctaattgtgataaaactgtcgtttccgtttgtggcataattccataaacatatgctaaaccaacgataccaactaataaaaacgctaaaattgaacccatagcaattaacgtttttacagcattattagcacttggttctctaaaattggttaccgcatttgaaatagcttcaacacctgttaatgatgaagcccctgatgaaaatgcttttaatagcaagaataatgttactccaggaaccgcagttcctactgatgcatgcatatgtggttgaatatctcctgtcgccacacggaaagtacctataaatattaatatcactaaccctataatgaaaagatatactggataggataatacggtggcagattcagttaaaccacgtaaatttaatattaaaataaaaagcacaagtaaacatgcaatcagtactttatgcccatataaacttgggaatgcagcaacaaatgcatcagcaccagatgatatactaacagcgacagtcagtatgtaatcgactaataatgatcctcctgcaagcaatccccatttttctcctaaattggtcttggacaccatatacgcgccgccacctttaggatatgcataaataatttgcctataagacataattaaagcagctaataagatcagaacagcacctgcaatcggtaaagtataccaagttgcaactgcacccactactgataatgtaatcagtatttgttcgggaccgtaagctactgaagataatgcatccgacgaaagaatcgctaaccctttaaacttcgatatcttttcgtcttttagttctctattttttttaggttgccctataataagtcttttaaattgattgaacataatctcctattcctttttatactttttgatggatatcactatacgcctatctttccaaaaagtatagagagttaattaatattttttatgtaattatacacctattaacatataaggtgtcaaaaataatggtaaatatacctctttaattaatttattcaatagaactggtataataaaataaatctcattaggcacttaagtaaatttaacatataaaaaggaacgtttatgactactaaaaaactgtattttctatccatttctattatcattttagtcgccatttcaattgctatatatataacattaaatagcaatacgaagacacggttaaccaatgattcgcaacaacaaatagatacaattatcgaacatgatttacaaaagggacatattcctggagcatcaattttaatagtaaaaaatggcaaagtttttttaaataaaggttatggttatcaagatgttgataaaaaagtcaaagcttctcccacaacaaagtatgaaattgcttctaatacgaaagctttcacaggtcttgcaattttaaaattagctcaagaaggtcgattaaacttaaatgatgacgtatccaaacatgtgcctcattttaaaatgaactataatggtcaaaatgaaactattacgattaagcaacttttggctcaaacaagtggtatacctagtgatattacaagcgaagacgccgtaacaaataaaaataatcgtttaaatgatgtaacccgtgcaattatgggtgatgaattacatcataagcccggagaagaatttgaatactcaaatatgaactatgatttattaggtttaattatccaaaacgttacgaagcaatcctatacaaaatatattacaaattcatggctcaagcctttgcatatgacacatacatcattcaaacaaaccaataataaatcaaaaaatgatgctattggctacgaattacaaggttcgacacctgtcgtctctaaacctgaatttaacctttgggatacaccatcagcatatatgatgacatcaactgaagatttggaacattggataaaattccaacttaatccacctgataaatacaaatcattagttcaacaatcacataaaaatttatcatcaacaattggtgaacctaatgccaatgcatatgcttccggctggtttaccaataatgatgaacatttagtgtttcattcaggaacgctcgataacttttcatcatttattttactaaatccaaaacaaaattatggaattgttgtgcttgcaaatctaaattcggaatatgtacccaaattagttgagcatcttaacacacaaattgtaaatcacaagcgatattcgacagttgcgtctatgctcaatcaatataaagatcaatttaatattgttaccgttttgatgacaacacttattttattagcatttatattctcagcttatcgtgcttggcaaatgcgtcacgggaaaatcatcctgcgcaaatcaaaacttaccacatttttaagttggctaactttatgtttatgtatcgctatagcactcatattatatgcattaccatatctcattctcggtagcaataactggtcttttgtactgacttggctgccaatagaaattaaattaacgttaactacaacatttattgcattattcagtatgttaattacaattctgttagtactacatacaacgacaattaagaaaccataaaaaagacttgttcaatcgcacatcaatccgaaacatacatatttatgtatgaggattagcgatttgaacaagtcttcattattaacatgctatatgcagaaaccgattatttaattggattcatgccatctttccaagttttataaatcagagtaccaccttgcgctttaaacttctcattgcttacgccacgttcaaatggttgcgcaggttgaatatcaatatttggttcaacaccaagttgttctttataccattctgcaaattcagaacctttaacaggtgcatcatctgctacattatagataccattttcaaaatgaatagcttgaatagatgtttcaactgcatcatcaagatgcacaaatgatgttacgccatctgaaagtgtcacttgaccatccataaattgattataaatcatgccatcttttccgtaccaagtacctgggccatataaccaaccaaaacgtaaaacaacgtattcatccatacgagccgtttcttcttctagaccaaccacaccatcaaccgttacttttctatcaccagttgagttaaaatcaagtgaagtttcctcatttgctaatccttcgccaggttcatacataaaggcaatactttgggcaattactttcttaacatcatgctttttcgccgcatcaattaagtttttagaaccttcaatacgtactttcgtatttgctgccatatcaacattttttaaatccgtaatttggttgataatgatttctggtttaaaatctgctaacgcttgatcaatagtatcagcttttaatatatcaccaatatatgcttttacattaacagcagctagcttttgttgaccattctcagatgtagtaaaaccagcaacctcatgcccctcttcttttagtctttgaactaatttaatgccaataaggcccgttgcaccagttacaaaaattttactcattataaacaccttttctctatttgtcttttaatataattacttgcttgatgagtgtacaaaattcacgtgagacttccaaatgatttgcctcaaattttttcaaagtgtcgtcgtaaaaactgtcttgcaaatactagtagcatgtcgtagacctatgacaaatctgaattatgacgaagaccaatcaagaaaaacagcaccaagatcatttcaatttgaaagtaccttactgctgttctttatttactacatttattttaataatgaccgtaatatcaagtgattgtcatttccttgcaatcacacctaaaaacactaattaatcctgtgcatgtcgctgactttctttagtatgaattaaatcagtaataaagcgattgactggcgcttcaatatgacgttgtttacctaatgttgcaactgcgccattaatataatcaatttcagtttttctattattaacaattaaatcttgatacatggatggataatgcgcaccaactttttcatttaaatcaactaaatattcaaatacttcatcaacatttaaatgaacattatcaatcgtcgctacatgcactatttcttgcgttaatttataaatcaaacacttcgcataactactttcattcagtgatgccatattacactccaacactgtgcttaatgcatttgccgtaccattaacacaaatctttttccaaatcgattggtataaatctttactaatgacaccattcaattccgcttcgttaagtaaatcagcaacttttataacattttctttaccttcatcaactagttcacctatttcaactggtccactaccaagtaaatgactgtgtccagggctttcaagacctgccgtccaagtcgtaacacctctgacaatttgtgattgagcaacatactgcgcaatgacttcttcatgcttcaagccattcatcgtacatacgacaatcgtttcattatcaatatgtggcttcatagcttccatcacttcttttaattgcatagactttggaaatagaaagacaacatcgtaaatgctttcgtccggttgatcattaaaatgatacatcggaatgtttaactcgaatgcctctccattaatcgttatatttaatccatgttgcttaaccgcttcaacatgagatgtatatccgtcaataagcgtgacatcatatcctgcttgaaatagtttggcaccaaagccactacctaatgcacccgatccagcaattgcaattttcatcctataaacccctcttcatcgttgttgttcatttttaaaatactactttcgcatattagcgtcaatttgaaattcattcgcttaatatgcacacagcttttatcgtctataaaagaacacacttaacattaaacgtcaatacgcaacattaagtgtgtatgataaacttactttcacaaaatttcctttaaaatccctacataataacttgctttcatttcagttttacaaattcgtttgatttttaggaactaatagtaaaatgactaaaaatgcaacaattgctagcaaggcattaaacatcatacctgtgaaaccacctaagttcaaatttaaattagctgctaacacagtataaaccgtaccagatactgctactccaaatgcatttcctaatgatgacgccattttatacacacctgaagcaacacccgacttatcatctggcgcactagcaactgctgtatcagttgatggtgtagcatataatcctaaaccagtaccaaacaataaatatccaactatactagatacgatataccacatttctggtaaaaatgttaacgacaataagattaacccaatcactgtaaagccacttcctagtaatagtgggcgcttcggaccatgttgagataaaatcttttcacctacacgaatcattgacaacactgctattaaatacgttaatgaaatataacccgtttgcgaagaattaaatcctaattgttgttgatagtacgtgttaatgacgataagtgcaccacctgctacaccatttaataagaagtttgaaatagttgcaccactgtaccctctatttttaaaaattgaaaaatcaacaagtggatgctttattttattttcgtaatatacaaaaccaactaatgaacagataaacactacaattaaacctagaattaacggtgaaactaaaccaaaatgagacgtctgtgtgatgattacatttaaacttaacattgtcactactaaaatgactaacccgataacgtcaaactttttagcttctgctttcatacctttgattggttctgctttagtctcaggtgcatgtttgattaagtacattgctaataatgttaatagaattgaaacaacaaatattgaacgccaacctatatatgtagccattaagccaccaaacaacgtacaaataccactaccaccccaagaaccaatagaccaatagcttaaggcacgttgtcttcttgtaccaatataatattcgttaataatagcaagtgtggatggcataatacatgctgcagacaaaccttgaattattctacctataattaaaaatgctggcaaaggtgtaataatgatgagtaatgaacctacaacatttaatatcaatcctacataagtaattttgacgcgaccaaatttatcagcaacatcaccagcacctacgataaacaaaccagcaaataaggcagataagctaacagcgatatttatcgttccaacgtcactactatatgttgattgtaatgggacaacaagattaacaagtgactgcgcgaataaccaaaaggtaataacccctaaaacgatacccaaaagcaatcggttgtcacctctaaattgttttgatgtgtccatgaattagataagcctcctatgtttaagaaaaacaaatttttaatatgatatattaagaaacaatatcataaatttgcagaaaattataaataaaacatctcattttttagcatttttacaataattaacgctttttatccaaaaactttcatgataataattgctattttagtgtaaacgcatacaaacacaacctataaaacggctactcaaagattatttgagctccttgagtagcctcattttttataaatcatgaaacggaatcgcaaaattataaacatcttctactattacatattaatactttgcggacgatgattagattgatttttacgatgtcgtgtcgttgggtctaatcgtttttctaaaaatcttaataggacatcaatgacgattgcaatgatagcaatcggaatcgcacctgctaaaataaacgttgtgccatccgtcgcatttgtgccacgaatcacaatgtcaccaagggtaggtgctcctataaatgatccaacggcaacaacacctatcgcaacaaccaaggcaatacgaatgccaccgataataaccgaaacagataacggtaattcaatcattcgtagcacttgattgcgcgtcattcccatacctttgccagcatccttaatattcgcatcaacactagctataccagtataagtattttttataattggaagtaacgcatataaaaacactgttaaaactactgtttctgagcctaagcccatgactaacattaaaatagctaacattgcaatgactggaactgtttggataatatttgcaattgtaattacaaatccagaaagttttgtgtatcttgcaagcaagattcccaatggaataccaattaaagctgcaaaaagtacaccatagacagacattaataagtgtttgaaaaataaatcccatagatagccaaagttcgtaacataataattgaataattgctgtaacaaattaccttccattacttatgaccacctttctgtttatcaaaatagtggtgttttttcaaaaattcttctgcgacgacagcaggttctttacctttaccatccgcttcataattcaagcgttgcatctctgaagttgaaatctttccagtcaacttattaatcgtcgttttaagttctgggtgttggcgtaataattcatttgttgcaacagcactcgcagcataaggtgggaaaaattgtttatcatctttaagtactttcaaatcatacgcggcaattcgaccatctgtagaataacctaatgcaacgtctaacttctctgagtttaatgcgtcgtagactagacctatttgcattggtctcactgtaccaaagtcgaaaccatactcttttttaaatccttcatagccatcgcctttacgattcatccatgaactatccatacctaaacgtaaatctttactatgctttgctaaatctgaaactgtctctaaatgatattttttagcagtttccttcgttaccatgaatgcatacgtattcgcaaaaccatacgaatcaaaaaacgtttgatcaaatttctgtttaaagccttgttgcgttgctatcattgctttcttaggatctttgattggtgcttcctttaaaactcccgttaaatctgtgccattatatctaacacctgatatattagcatctccattaattaaggcattatgttgaatcgtacttgaccctaaattatttactaatgttggctttatcttgccatgtgtatcatgctctattaacaaccgtaacatatgtgaaataatttgcgattcgcttgttgataatgctgtaattttgacatcatttttcgtgctcttactacctagtccgggcaaactacatccagataatacggtaagcgataagacaagcacgacaactatatatttaattttcttcattatcttagcctcctaattatccagatacttttaaccctttaggaactacccatttttcaactaaagctaataaggcatcaacacctaatgctagtgcagtaacgagtaccgttgcagttacaatcatcagtggatcatataaatttaaaccattgaaaatgaaatcacctaatccacccgcacctacataacttgcaagtgtagcccaactaattacatacacagacgacaagcgaataccgcctagtataagcggtaaggctaacggcaattcaatatccttcatcaattgaaattgtgtcattcccatactttttccagcttctttaatgttgctatcaatattttgaacgcctagtaccgtgttatttaaaataggtaataatacataaataaatagcgctacaattgcaggcgttttaccaacaccaaaaatcggtatcataatagcaagtacagctagtgttggaatagtttgtaagacacctgccacagttaatataatattggcagttcgctttgtttttgataataaaatacctataggtactgcaacaatgatggcaagtaataatgccactatagaaatatagaaatgttccagtgttttcgacatcaactgtccaccatgttcatgtaagaactcgatcatgatttatcatctcctatgtcacgtactttgacattagtagtgtgttgctcatgcacttttgaggacgtagtgtcttcccccacatgttctgtttgcactgtatcctcactatcgccccaaattgtgtcatatacaatatcaacaacattggcacgcgtaatcagtcctactaaacgttgcttatcatctacgacaggtacattcctaacgtttctttttaaaatcgtacgtacagaatcttgcaatttagaatcaatttgaacggtataaatatgttgttgcatggtatctcgtaaacttttgtgtccacgtataccctgatttatatcttcaatgtctaagaatcctagtaaatggttatccctatctactacaaaaatagtatcaacacgtttttgtctcataatatgaacggcgtcattcagtgttgcttctgcttgtatcgtgattggtttaatcattacaccttctacagtcttgtcattgggacggtcttgaatcagtctattttgtcctataaaatcacgtacaaaatcatttgcgggatgtcttaaaatattatctggtgtatcaaattgcaccaccttaccttctgacataatacaaattttgtctgctaatttaatcgcttcatccatatcatgtgttacaaagataaacgtcttacctaattttcgttgtaacgttttaactaaatcttgtaacgtatctctcgtaataggatccaatgcaccaaaaggttcatccattaaaataatatcttgatcggccgcaagtgctcttacgacaccgatacgttgttgttgcccacctgatagttctgctggataacgctctaaaaatgactccggtaaatccacaagtttaattaattcctttgcacgtttatccttttcttctttagtccatttcaacaatttgggtaccaacacaatattctctttaatcgtcatatgaggcattaagccaatttgttgaataacatagccaatatttctacgtaattcgacaggattcatactacgaacgtctttaccatcaatttcaatttgtccttctgtcgcttcaatcatacggttgatcattcttaaagcagttgtttttccacttccactggttccaataaatgcgataaattccccagattgaatatctaaagagatgtcatctactgcctttttattaccagaataaattttcgttaaatgcttaatacttaacataatcatttctccttcctcataaaaaatatgacgaatgatacgcataaaataaaaagaccatcatcgcaattgttaaacaaatagagtcataagttaaacaagtacacatcatggtcttgattatgtagaattttatatttttcatctgtaatgtgaatacttaacagtaaacggcgctatgtatgttgaatttctaccgattactttgtttgcacattcgtatattcgacatttaaaactaacatactctatatgatgttattaaacattatcattttatcttttgcaactaaatagataactcatatttttcaaaagcgaatttattatcgctcaattggttgttttatatcaaaaaagtgtcgaaaatgtgaaatattattacaaaagtcgaatttttgtaataatgcacacgcatccattgttacaggcggataaacgtccatccgccactcacaaagtcatccttatattttaatatcttcagcattcattgtagacacccttgccttttgctaacagttcctactcccaagcctgtaacggaattccaccgtcaaagtgttgcccatgacaggcacacctaaaaaacaaccaacagcatgagccattggttgtttcatgtcatattgtatgttgttgtataactggtatgcttttactcattaattacttatcatgcatccctttaccttctagtatttggttaatatacttttcaacacgcttttgtcttgtttcactgcgtttagcttgtccaatatgatatatatattgatgttgtctgcctggcgttaatttataaaatgacgactctagctgtggcatttcttcgaacttagcttctaactctttaggaataacatattcctctgttttcttcattttaacttttttaccagctttttcagctttaattgcttcagcaatatagtatttgatttcttctctacgtgcttgaatctcttctagattttcaaatcgtaactgacgagctgcttgcaccttttcagtctgttgaatgagtgtatgatatttatcctccaaaatggcacctttatgaaataatagtgcaacataatttttgaagccatggataagtactacatttttattattcaacgtgtaacaaggatgcatccatttatacgcttcctctaattctgtttcattaaagattaacgttctcaaatatttatattcttcttgccattgactctctttatttaaaaatgcctcaacttgttcattcggttgtttctcactcatagtcatcacttccattttatttttcaatacacattgtattatatatcctaattttataaaaaactaattttacaaatgcttttgcattcttacaaaaaatgcatttgactattatattaataagcgtataatttttcgcatactattttttgaattttcggcaataacgaaggagtatttatgaataaagacaagcaattgcacaacgacaaaatcaatctatcccaattagtattactagggttaggttcattaataggatctggttggctatttggtgcgtgggaagcatcatcaattgctggaccagcagcaatcatatcatgggttcttgggttcctagttattggaaccattgcctataactacattgaaatcggcacaatgtttcctcaatcaggtggcatgagtaactatgcccagtatacacatggctcattattaggctttattgctgcttgggcgaattgggtgtctttggtgacaataatacctatcgaagctgtgtcagctgttcaatatatgagttcttggccgtggcattgggcgaaaccaatgaaacatttaatggaaaatggctctattagcacatacggattgctagctgtatatctcatcattgttattttttctttattaaactattggtccgtaaaacttttaacatcatttacgagtttaatttctgtatttaaattaggcgtacccatgttaaccatcatcatgttaatgttatcaggattcgacacttcaaattacggccattcagcaagcacatttatgccttacggaagtgcaccgatttttgctgcaacaacagcatcagggattattttttcattcaattcattccagacaattattaatatgggttcagaaattaaaaatcctgaaaaaaatatcgcaagaggcatcgctatttcactgtcaatcagtgcagtgttgtacatcattttacaaagtacgtttatcacttctatgcctcaatcaatgttacaacatagtggatggaatggcatcaacttcaattcaccatttgctgatttagctatcttattaggaattaattggctcgcaattttactatatattgaagcttttgtatcaccattcggtactggcgtgtcatttgtcgccgttacaggtcgagttttacgagcaatggaaaaaaatggacatatccctaaatttcttgggaagatgaatgaaaaatatcatatcccacgtgtagcaatcatctttaatgccatcattagtatgattatggttacgttatttagagattggggtacgctagcagcagttatttctactgcaactttagtagcctatttaactggcccaacgacagtgattgcattaagaaaaatgggaccaacaatgactcgtccatttagagcaaaaattttaaaagtaatggcaccattatcatttgtattagcttcattagctatatattgggcaatgtggccaacaacggctgaagttattttaatcattatacttggattaccaatctacttcttctatgaatatcgtatgaattggcgtaatacaaagaaacaaattggtggtagcttatggattattgtatatttaatcgtgctatcaatactgtcatttataggaagcaaagaatttaaaggcttaaatatgattcactatccatttgactttatcgttattattattgtggcgcttatcttctattacatcggtacaacgagttcatttgaaagcgtctatttccgtcgcgcaacacgaatcaatacgaagatgcgtgagtcactaaataatgaatcaaagtcatctcaaaaaatattttaaaatgcagtgccatatatgatttcaacacacacattaaccaaccattgatttcaacatcttggttggttttttattttgaaaatgggttataaataactaacataacaagatagcgagagtgatattgtaatgaaatgtcactgtagaataacatcatataatgctgaaaatggtttgagttaaaacagatatcaagctcgtctgattcagccacaaaattgtcttgttatacttgtcacctatcatccatagaccgtggtatgattaaattggggatgataaaggaggttaataaatatgaagattaatactacaggtggtcaaattcatggtattacacaagatggtttagatatcttcttaggcattccttatgcagaaccaccagttcatgacaatcgctttaaacattctacgttaaaaacacaatggtcagagccaattgatgcaactgaaatacaacccatcccaccgcaaccagacaacaaattagaagattttttctcctcacaatctgcaacttttactgaacatgaagactgtttatatttaaatatttggaaacaacataatgatcagtcgaagaaacctgtcatcatttatttttatggtggtagttttgaaaatggtcatggtacagccgaactctatcaaccggcacatttagtacaaaataacgacattatcgttattacatgcaattatcgtttaggcgcattaggatatttagactggtcatattttaataaagattttcattccaataatggactttcagatcaaatcaatgtcataaaatgggtgcatcaatttattgaatccttcggtggcgacgctaataacattactttaatgggtcagtctgcaggcagtatgagcattttgactttacttaaaatacctgacattgagccatacttccataaagtcgttttgctaagtggcgcactacgattagacacccttgagagtgcacgcaataaagcacaacatttccaaaaattgatgcgcgattatttagatacagatgatgttacatcattatcgacagatgatattcttatgctgatggagaagctaaaacaatctcgaggaccttctaaagggcttgatttaatatatgcgcctattaaaacaggttatatacaaaataattatccaacaacgaaaccaatttttgcatgttatacaaaagatgaaggcgatatttatattactagtgaacagaaaaaattatcgccgcaacgctttatcgacattatggaattaaatgatattcctttaaaatacgaagatgttcagacggcgaagcaacaatctttagcgattacacattgttatttcaaacagccgatgaagcaatttttacaacaactcaatatacaagattcaaacgcacaactatggcttgctgaatttgcatggcatgatacttctagcgcacactatcgcagtgcttaccatattctagatatggtattttggttcggaaacttacaaatattagcagcacatcaatatccaacaactactcaccttaaatttttaagtcgacaaatgcaaaatgatttagctaattttgctaaaagcggtaaaatgccttggccgatgtatcataatgaacgtcgctattatcgcacatatcaataacgttatcgcatctaaaaaagcacacctgaatttgataacaggcgtgcttttcatatgagaattatgatgatttaaatgttttagcataatgattatttttcaatgtgaaaacaacgattaatcctaatgcgccaatgatggcactcgtatacgtgacagcttgaacagaaacatgtgtcatgaccaagcctccaataatgccgccaacaccaataccagcgtttaaactagacatgttccaactcattacttgacttgtatcgccttcaacatgttgaatcacaccgctttgcactgctggattagtactccattgcatgatattccaaataaatagtcctgctaacaacagacctgaaccaggtaagattaaattcataagtaacatcatgacgataaaaatagaaacagaaatcattaaccaacgcttacttgtaattttatcggagaatataccacctaatgatgttccaataacgccagcgattccatttactagaagtgctaatgaaacgaatgacatatcatgaccattagataaaataagtggatttataaagacgaatgtcactgagtttgcaatcaatactaaaaacgtaataattaaatattttgctacttcagcaggtcttaatattttcgaagtaacatgattttcatgagatggtgcctcatgattcacagggcctcgttgtatttcctgatccttcggtaaatagatcatcattaagaagccaacaataatactcacaataattaagaatagaaatgtatagcgccaacctactaaatcgccgataaccgttccaattggtacaccaaaaacattggcaccactaaaccctgtatagacaagtccaatcattttgccacgatttttaggtgctgataacatcgctgtaatagctaatacttttacgataattagtgctgctgctgcagatgagataattctaccaactactaatattgaaaaatttggcgctacagcaataatgccattaccaatgataaatataagtaatgtccataataatacaggccttgatgaaaaacggttcgttaatttaacaagaataggtccacatatcgcaaatgttaaagcgtacattgtcactaattgaccaacgacagcttctgatacatgtaagtcctgactcatcaagttcataattcctgcaaccatcatttcaaccattcctacgataaaaatacttaaaatgaatgtaaatagtcgcatgattgacattttaaaactcctttcaacaaaatttccgatattcatttcccttagaataacgatttattaaaaaatgtgtgcaacacaattttatatataaccgttctattatataatattttgctttaattttctgtgcttaattggaaaattattgaaattgtttttcagtatttgaaaaattaacacaagtatgtcatttaataattatgtataattacttcagtttcaacaatgactccaaaaaagcacgcacgctttatatgtcagaacagataactgactacaaagaatgcgtgcctttataaatattttcgctgagctaaataataacattactatatgtgcgtgtcacttcatttccaattaaaactaatgtctaaatctgatgcggtaaaatctatcatgactcactcttaacatccgtatttcttgctactaattgatgtcttgcattgaaaaattgaccatagcttaaatatgtcgcaatcaaagcagacataatggtcgcagttgtatgaataaacacgactaacaattgaaatttaatcgcttgtaaaggtggtacgccaccaataattaagcctgtcatcataccaggaatcgacacaagcccatatgttttaaccgaatcaattgttggcactatagctaaacgaatactttcacgtattgcacctttagaagccaatttaggtgtagctgcaagtgataatttagattcaatattagtaccatcttgtacgaatgcacgatctaaattctggtaagctaaattaattgcaatcaagccattatttgcaagcatgccgccgataggtataacttcattggctgtaaattgaatggcccctgtcgcaatagtacctgcaagcggtaatgctgttccaacaaagatagccacaaaggaaatcaaaaagacatggtgcatgacaggtgatgatcgactaatcgtattccatgatgcgtttacaataatgacaaatacacataatactaatagccatttgtcattaattttaaaaatatagtgcagtaagaatcctaaaatgattaattgtacgaccgcacgaagtgtcgccacaatcaaatctttaataatatgtagaccttctttataagaaataataattggaataactaatagcaatgccgtcagtcctaatgctgtattactcatgttggttcaactcctctgtattagaaatttgaccatcaacaattgttatacgcttttgaaagtgtcgcatactttggtcatcgctgtgggtaatccacataattgccacgccttgatctgctaatttaaaaatgatattttctattttttctttattattaatatctaacgcacttgttgattcatctaatagaaggatgtctggggtatacattaattggcgtgcaatcgcgatcctttgacgctcgccacctgacatatgttctattttagaacttaattgatagtgtcctaaacctacatctttaattaattgcttggcacgcttcttatcaaatttatcattacgcgcaacggacggaaaaatcatattatcttcaatcgtttcaccaaataaatcactttgttgcattaaatagctaatgtgtcgacgtaatatttctggttcgtaatcatcatatggtttacctttaaagtaaagcgttccactggttgggctaattaaattacatattaatttttgaaatgtacttttaccactacctgaaggaccaataattgcaatggtttcacctttatctacttttaaattaatatgatttagtatgactctatcacttgcctcataaactaaatcttttatctctaacaacatatttacccctcctcgtatcatgagttatttcgatataatagggtaatccttttcttgaatagcatgcttacctataagtcgacctagtcaatgcttattaccccttaaaatcgctctaataaaacatatcaaatatagtattcccatttttgaaaaatttagtgccatttcattctggaaaatttttttaatatttatgtgaaaattgaagtatactgcagtgacttagtctcatctttataaaaataaaaagcctttaacatgacatctcatgctaactaagcatctaacttagttcttgcatgacatcatattaaagactttctctattatttatgaatttgactaccacatgatatttttataagtttcatcattcaatgaacggacaatttcagtaacaagacggacagaattttcataatcatctacattgagtaccgatacattagagtgcatgtatcgtaacgtaacacctattgtcatcgttggaataccttcatttgcgacatgaatacttcccgcatctgtacctccacctggtgtcgtatcccattgtacttcgatgttatgtttcttagctacatctttaatatgcttgcgcaaaccttggtgtgcaatacttgtagcatccatcataataacaactggaccaccgcctagtttactatcgctcgtttgacctgacatacctggggtatcataagcaatacccacatcgacggctatcgccaaatctggtttaatcgtattcgctgccactttcgcaccacgtaacccaacttcttcttgcactgtggcaccactgtataagttaatgccaatattttcatcttttaaacgttttaatacctcaacagctaatgcacagccatagcgattatcaaatgctttcgcagttaaatatttatcatttgtaagcacttcaaattcactatatggcgtaaccatattgcctacttcaacgccagcttcttccttgctactaacaccaatatctataaacatatttttgatttccatcggctttttacgttcttcaggcgttaagacatgcggcggtttagaaccgatgatacctctaatttctttgcccaaatctgttgtaatcgttactttttgagatagcatgacttgattccaccatccaccaactggcgtaaatgaaataaaaccatgtttatcaatctttgttaccataaaaccaacttcatccatatgaccagaaatcataattgagtattgaccattctcagcatttttctttccaaaaatgccacccaaattatcttcaataatttgatcactgacaggctctatatagttacgcattgcttctttaacttgcatttcataaccagcaatgccgtttacatctgttaaatgtttaagtaatttgactgactgattcatgttattcatcctcctgtatttcaacttaaaactattgtatcactaactttcagaaaaacgttccctaccgctttatcatttttcaggcttaataattttaaaaactttgtgagaaatccgcttcaaaaacctcatatttacaaaaaaattatcaaaatttaaatttttgaataacatcattttttagtaaatgttataatttctttataatacaaatatcgaaagaaggcgactgactttgaaaaaattatgttcattaattgtagtagcattagtttgtgtcattgcattatcagcttgtggtaaagaacaaaccaaaacatatgaaggtgatgttagtggtaaacatgtactaacttctatcacatataaagatgataaagttttaaaacagtctacaatcaacacaattaaatatgacgatctaggtatggataaagacgaagccaaaaagttattcgccaaatctgaaagtattttcaaagaccttaaaggcgtaaaatacaaagtagactataaagataaaaaagcaattgaacacttagacatagattacacagaagttgacatgaaaaaattaaataagcgtcttggtgtttcaactaaagaaaataaagatattagttttgaaaaacttgaaaagcaattaaagcacagaggcttaaaagaaaaagataaaatggacgacaaatagtttataacataaaaatgccctcagataagactaaggttacaaaccttaattcatattctgagggctttaatatttgaaattcttgtgtgaccagcatccactactaatataaaattatttgcagtaacgctaaaatccgctgctttcattttcccgaaataaataagttaactaatgagttttaatttataatcatgtatcgtttgcaattcaccatcgacttttcgatatacaatatgatcagcagtaatttctgtaggattggatacgccaacagctgctgcaatattgaataagccttcatgcaaacttgttacatagtttgtgacacgatattgcttttctccaacaatcaatgctttttcttttttcgcatctgtcgttgcaacacctacaggacatgtattcatatgacattgttgactcataatacaaccgacactaatcatcatgccacgtgcaatattaacaaaatctgcacctaaacctagtgcaatcgcaattttatctggtgtcactaacttaccagatgctgccaatttcactttatctcgaataccatatttttctaacatgccagacacaataggtagagctgtaaacagcggtaagccaacaccatcttgtaattcttggaatgttgcaccagtaccaccttcaccaccatcaatcgtaataaagcttggatacttatctagttccaccatcgtacgtacaagtgtttcaatttctgaaactttgcttactacaattttgaatcctactggtttttgacctaattgctgcaactgatcgacaaaacgaatcaaatcttcagcattatgaataaattcgtaacggttaggtgaattgattgttttataaggttcaacatttcggattttagcaatttcttcgtttaccttttcagcttccatatgaccaccacgagtcttagcaccttgtgccaacttcagctcaaatgcgcgtacgttagataactgtgcgacctctttaaataaatcttcactaaaattaccttctttatcacgaacaccaaacaaaccgggaccaatttggaaaatgatatccccattaccttttaaatgatattctgataagccaccttcacctgtattcatccaagtgcccgcttttgctagacctttagataaagctgtaatggcattttttcctaaggctccataactcataccagattgtcctacgatacgttttaaaataaacggatgttttaaatgttcacctaattttattgcatgatcatcacttaagtaatacggatcaatctttgtcggtacacgatattcttcacgactaaataaacgctcattcgcgattttataaatgaatgttgataacaatgttgtattatctactgaaatctcattacgttgcatcggaaacattgtgttctgtatgtaaaagccgtcttgataatctttagtagtaccgaagctggtcatacgagagttatattttccagccaaaacgatatttttataatcattacgtgaaaaaggtttcccttcattatccccagaaaataaatactgacgtaattccggtcccattttttctgaaatatatctaatacgtgctagtaaaggataattccttaatacactatgttgtgattgtcttttatctttaattaaccaaataagcccgataaccatgaccgtaagtaggaagcctataatgataatattaactataaattgcatgactgtaagaaacgtcattacaatccctcccccaaaaatttcaattcactatttatgatacaccttacaaaataaaacacaatggaagcgcttcattttataaaacaattttatgatatgtttttcattttaaattttaatgtataaaacatacaatacaaagtaatatgtgctaaagtatctatataatacaactatttaagaggtatactatgtcaaatacaaataaacattacatagaagaatacgctaccgaacaatcgcgttttttcaaacgtgatattggatttattttcctttatatatttttggttaacatcttgccaatcattatcgtctttttaacttttgagttagtagctgtattcactcaacaagccccatggggtttctcttttcctatttcaatgaacattagctatttactcgcagttattatttcactagctatttttcgtctgatgcatgaagatgcgtttattccaatgatacgttcgcaaatcgttgccagtgctaaatataaatggcatattcttatatcatttacattaagtatcgtactctttttacttttaaatcatttcgatattttcgcactaaatgtagattcctttactgtctttgacatttacccgctcattagagaatatggttccatcagtttaatagctatattttcgttaaccattatattaaatactttgatttgtcaacttattttccgtcatattttaattcaagaattaagcagattaatacctttaaagattacaatagtattatccgttatccttgaaacactgtactattatccatacattaatacatggtgggaattcattccagcattgatactagctagtagtgcgacttacttatatttaaaatcaaaccgtaattttatggtgagctatttctatcaattagcagttatactcgttttgcatattttcatgtaaattttttcagagtattatccattatccatacacatcaaaaagcacacttaaaagtcagtatcacaactcacttttaagcgtgctttatttagatatactgtcgttctaaaaacgagccacatagaatgtttcatgtcctagcatgaagcacatgaatcgccatgctcaatataccttttaaaatttaaatatttattaacttaatatgctttaattcacttcattaaagactatttgctgggcgtggtgttggttttttcaataaactcataatcattattacaatgactaacataccacaaattagatacatccatttaaatcctactaagtcggaaataggtcccatcaatgcgccacctaacgatatacctaagtctgcacaggcaataaataaacctaacaacatattacgacctacttttggtaagacgaaacttaagtatgatgttaatgttggatacaccattgcttgtgtcattcctattaatattgcactgccatagaaaataattgcacctacttgcggaccaaatgccactataaatgacgcgatcactaataatgatagtacagataccatatatttaggatgccacataccatctgacggaatgtatttccttaagtaaaatcttgccacaacaactgcgatggcctgtattgtcaaaaagattcccgcattcgcgaatcctaaactcactgtgtataacggtacaaatgtactaactgcaccaaatacaatcgatgcaacaatcatgataataccactgttcaacaactctttatttttgaaaaattgcgcaaaaacagttacagcgttaaacggcattttttcaatcttatctgacgtatcgggttcctgttcagcaaaggtcacgcgatagccaaagaatgttgttgttaatgcgataaagataatgacaattgcaaatagtgaaatattatttgcattccaaatacctacggcaactaatggtccgattaagtttggaatcgttgaaaatagcgagtacaatgatacaccttcagaacgatgttcctctggtaatgcatcaataatacctagctgtaaagacatagaaaagaatgccgtacacacaccttgcataacacgtgctacgaaataaccttctaagccagtaaaaccataaataattaaagctatggcattgataatcaaaataattcttaatactttaatgggaccgacacgagcaataatttgtcctgcccatggtcgaaataccattgctgttaacatgtatgcccccataacgataccgataaccgtattcgttgcgcctaaatcatgccctcgtaaaggtataaacacgtttaagattgcattggcactaaagaacatcaatgttaatatatataatctcaaaaagggccaagccattgcacctttcattatctcactccttagaatgatagttgtttttctattaattctcttgtataagcattgtcacttttatgcaatgcgcttgtcggaatttgttcttctatttttccgtttttaaaaataattaattgatcacataaatacgtggcagcttgaatatcatgtgtgataaaaatataactcaactgacgcgtttcacgtaaatgaatcaataagtctaatatttgtgtttgaattgacatgtcgagtgaactaatggcttcatcaaacaaaatatatttagggttaatacatattgcacgcgcaatcgcaacacgctgcgcctctccacctgataacatattaggatatttatccatgtatgccttagatagaccgacttcttccaacaatgtaattgcttggacttccataacatctttaggttgtccatcacattgacacatcacttcaaataagatttctctaacagtctgaaatggatgtaatgatgacgtataatcttgaaatacagcaccaatttgatgacgtctcactttcttcttatgcatcggttgatcatttaaggttacacaacctttatccggtttctcaatacctaatatcatacgactcaacgtcgatttaccgctaccactttctccgataatcgcaatcgtcgcaccgattggacactcaaatgacacacctttcacgataggtgttcgacgacgcttaaaaacatgtgcgctttgatatgacttttcaacatctttaattttaatcacatacatcacccctcatcacatgtttaaaatgatcattaatcttcttcttagttgataataaatacttcgtataaacatgttctggatgatgcaagactgattcacgcgtaccatgctcaatcagttgaccatttttcatcacaacaacacggtctgcaatcttgttaataaccgttaaatcatgtgaaatgaaaatcatcgcacagtcaaagtgttttttaatatctataaatgcttccagtacatcatattgtgtaattgtatctaaagccgttgtcggctcatcagcaatgattaactttggtttcaaagctaacgctaaagcaatcatcaatcgctgtaacattcctcctgataacatgtaagggtatgattttaatatacgtttaggatctttcaaacttaaataatccatatattcaatcaatgtcttttcaatttcttgtgtagacattgacgtatgtactttcatagtctcaaacatttgtttaccgacagtagttgatgggtcaaaggcacgactaccttgttgcatgaccatcgcaatatctttaccacggtactttttcagttgcgattcggataatgacaacattgatgtaccatcaaaggttatatcacctgttacgcgtaatcgttctggatttaaacctacaatcgatttgcatgtaattgatttaccgctaccactttctccaataacgcctaaagtttcacccttagttaatgtaaaattcacatcactcacgagtggttgatctgtccaggtatctgtaatcgtcaaatgcttaactgttaacaatgtcatgattgcatcactccttttttcacagaacgaagtttatctttagaagagatgcggggatcaatggcaatttgtaaagcatcggataagaagttaaatgccatcactataatcacaatggcaatacctggcgcaaacatcatttcaggatgtgtaaacatcacttttctagcttcgttaagcatcataccccactctgcagtaggcgctttgacacctaatcctaaaaatgaaaagccagatatttgcaagatcattgaacacatcgaactactagagatgatagcaatatctgctaatgttaacggcataatatgtttgtgaataattttcatatcattcataccgattgttttagcaaatcttacatggtcagaagcagtgtactgcataacacttgtacgtataacacgacagaaccatgcccaacgcgtcaaaataaatgccatgataatattttcggcacccataccaaacaatgcaattaatgctaacgttacaacataacttgggaatgccaacataacatcacacgcacgcatgattaaggcgtcaacaaacccttggaaatatcctgataagaatcctaaaatagatccaataagtacagaaacaaatagcgcaacaaagacatataacaaacttggtctaatcgcataaattaacctagttaaaatatctctacctaaatggtctgtgcctaataaatgttgaaaactcatgccagcaaatttgtttgctgtatcgatatggttaggatcataaaatgtcacaagtggtgctgctaatcctaaaaagacatataatacaataatgcctaaagcaatcactgcacctttatcttgtaataatcgttttaaaattatcatcgtgcgccctcccttagtcttggatttaatagcgcattaatgatatctgctaatgtattaaatacaataaataataccgctacaattaatacatatgcttgaatgactggaaaatcatgttcaagtattgcttttaaacttaattgacctagtccaggccatgcaaagatatactcgataacaactagtccacccattatcattggtatagacatacaaaagattgataccgcaacttgtaaagcattacgcaacacatgcaacattaatgtgatagatttcacaccgcttgctcttaaataaagtacataatcttcatttaattgttccaccatcgaacgtctaacatttctaaagtaaataccagcataggcaatcgtaataacgatcactggcaatatgtaactttctggacctgttaatccagaagtcggcaatatgtttaacttcactgaaacgtaaataataagtattgaagctatccaatatgatggtaatgcagttagaaagaaagccactgaacgtatcgcacgatcagtgaactttcctctttttaatgcactaactacacctaaaataattgatgtaatcattaccataacacttgaaattattgttaatttcaatgtattcataaatgctggaccaatgcgttcagcaacaggatcacctgtaatgtagcttgtaccaaaattaaattgcatcgcttcaagtaaccaatttttatattgaattaataatggatcattgaaaccgtacttctcattcgtttctgcaatcaactctggtgttacatttggcgttccttgtgcatgtaaaattgtcacagctggattttcatttgtaatatacgtcaatagaaatgtcataaaacttactacaatcatcaatggaaacatgagcgcaatacgttttaagataaatttgaacatctaaacgctcctttatttatactgcatttcattgaatggtaattcatactgtgattgtgtgaatgatactttttctaaatctttcggcgcaacaactgtcatactaccgtgtgaaatagggataaagataccttcatcatcaatttgtttcaaaatgtttttataagcgtctgaacgctctttaccgttttggattttaaatgcgtcatcaatgctgttgtatattttatctttgttctcaatgcctgatgttgcactttcataaccatttttcgctttaaatgctgcaatagtactttgtggatcgtacaataatccccaagtttggttgaacattaagtcataatcaccagaagtacgacgttcagcaattttatctgatgtttcgccattgatgtttaacttaatacccattttcttaaattctgcttgtaagtattctgcttgttctttttgacttgaagaacctttgtcatagtacattgccatttcaaggtttttaccatctttttgacgaacatcgctgtctttacctttcttccaaccagcttcatctaataatgattctgcttttttaaggtcatacttacgtgttggcatatcgaaattaatgtctgttacatttttcgcaaataattgagttgctggtttttcttgaccatctaaaatttctttggcaattttatctctgtttaccatatgaccaatcgcttgtctgactgttttgtcactgacagcgttatcttttttaccagaattgaccactaacattttcgtattcataggttgactacgcttaacttgatagtcacctgtatctttcaattgttttaaagagtctttgtctaagctatctgtacctctatcgtctgtgaaggcaaagtttgtttcaccttttttcattgataggaatgctgtttcaccagcaggcattacttttgcttgtactttgttaagtttagacttttcgccccagtattgatcatttttattaaagtctgcagactcatcttttttgtgttcacctaatttaaatggaccagtaccatcgaactttttaacgccatcttttgttgtgccgtttttaaagtcttttggagacacaaatacatatggacgaggcatcgctaattcagccaatgcaggttgatatgcttctttcaaattcaattcaaccgtgtacttatctttaactttaacattgtcaattaatgttgaaatctttaaccaagaatgcaattttttgttttcttgaactgcgtcaatatttttcttaactgcgtcagcatcaaatggcgtaccatcatggaatttaacgtcatctctcaaatggaatgtatatgtcttcccatcttcagacacatcccattttttagctagtaaaggcttaatcccatctttcgtgttacgtacaagcggctcgtatatcatactttcagcagacatcgatccaccgtaaacatgcggattcatatccccgatatctttaaccgtcgtatacgttaattgcttgttttcttttttctcctctaaacctttattaccgccacaaccagttaaaattagccctgatgcaagtaacattgcactcattttagttagttttctcatttgcttttcctctttctaaattgataagttgcattacttaatcaaatcgtaatgattatttttctcaattatttgcttatttttatgtaaatgtcaaacataattcaataatttttttctattataaaacttcaaacccttattatgaaagcgttctattgatttccaaaaattttgtgacgagtgccttatcttcttcaaataaatttgtattaaattgagaagataagtgttgatcttgatgcatatccttgtacgcctggcaacttgcttcatagcgagttaggaactgatcaatcattggcgttttgatacctagcattttcccaatatgctgaatcatcgccgttctgtaataatcttcacttggcattcttggaatttgaacaacatcctgttcatttttatagacttgcttaaatggtacagctgaaaaatcaaagtaatgtccgttttcgtctggctgtgaaaatggatcaatgaggattgcggtatatcttacataaagtagatattcttgtaagatatctggcaagatttcgaaatgctcaatatcaccttcatccaaagtttcaggacgtaccggataattttccttcaccataaattgaagcaggttgactgacggcactctaaatgcttgtaaaatagccatcatttctttccacattagacgcatttcacggattagtgtcatcgttatcggtccttcaggaaataacttatacacataaaccggtacatccgttccttcgaaaatggctttcaatgaaaagtcattcataaatagtggtgggtgcacataaagcgaactgttacgtgtttcagcatgcagtggcgattcaacgacttctaattgaatcttcaattgctcagctaaaacagagattcgttgacacattgttgagtttgaatatgtcgaacccatgtacaatttcttttttacacctgttgtcaacacatgattaggtgcttctttatcaacaatacgtgtatcgccaagataagttgaaaatgaaatcacttcgatatcctgactgaacttagacataaattgttccacaatcatttgcgatccaaatgtcggtgaaattaaaatgacatgtttgacactttgcaaagtttctaacgacaattgctgtagtgtgtcataataagcatctgctgtacatgccatgacaaccgtttcgtattcacccttaacgtttttaacgtctttatacaaacgattaatttcaaacttaccttccagatgttgatgcgcctcgttttgtattttgacttcaaattgtttctcttttttatacgcttgatataagcgttttgatttttctgatgttgaggcacgtccaaccatatcaatctcataatctgattttaaatagcaaatattcgctaattggattgcgaccggaccagtgcctatcattaataatttagacatccgtaatacctacctttatagctgcttttttataaagtgctatatcaaaaatttgctgtggtctcatatgtttattcacacattgccacttatcttccgctgtttcttgtgacggataattaaatattgctttgatgccatcaccaaagcgcattgcaactacgacattttcatttgttaaatcatataattcttctaaaatgctgtactttaaaggaattgtcgagctgaatatgatatgcgtcacatctttgatatctttaagttcagataccttttgatccgtaattgttatatcttcatttggtgctaagacgttaacgattctgcgtcctaggtcaacggcttgtggatcaatatcaataccgataactgaagcacctgtttcttttgctacttgaattaacgtcattggatatgcacctgaaccaactagcaataatttgtcattgctagctatactacattgtccaaactcttcatcaatacaatgttctatattgtcaaagtaacctgtggtagacgcctgtccgtctaatagacgtctagctctaatgacttccacttgtttaacacactgcgctgtaatatattgcagtgaatttattaattgtgctttttcttcaacgtcacgccaagcattaaattgttgttcataaataggatttaaaataaattcactatagtcatccatcaatgtttctaatgcttcgatatattgatcgtcttgtaatacacgctcgtaatgcgcttcaaacttttctaaatattgttgtaatatcaatttgatttcattattaaagttattcattgtaggctccttattctatatatgcttttcctgtagctacagttgtaacctgtcctttaattgaagtttgatatcccaattggtgacatcgctttgatgtcactaaaatactgccccctggctgatgtactgtaaaatctttgcatgcgtcattacgttgataattattaaaaaccccaattgatgctgtaccagaaccacagctattttcccaaattaaactttggatttctggtatatagattaatggctgtaaaaattgacgttgttcatcaaaaagcatcatacctactgttttatatttgtgattccattgttgcttacgcacatacgtttcaaccaaatgttgaatttctgttgttacttgtttaactggaatcacataatgtacatatgtttcataaataatttctattgctttccatgaatgattacccatattaattgttgttggcacaacacgatgggcttgtggcatttgaacttcatagtattggcaatcatgaattgcgcattgcactaaatccgaacagccagacaccttcaccttaaactgttggtctttaagcaaatgactttcttgcaaatgatgtatatatgacatcgtcgcattaccgcaaaattcattaccgctcataactagatggaaatcattgccatcatcattttgtgttgattctataaagcctacctgttcacaacatacatgtgttgcggccatcaactgattggcgatagatgcatattcactagcatcatgttttgaatgaacaagtatcgtcatattccccgaaggattatacttagaaaattctataacctgccgattcatacgacactcctttagatgtattttttagggagtgggacagaaatgatattttcgtaaaatttatttcgtcgtcccaccccggcaaggttgactagaattgaaaaaagcttgttacaagcgcattttcattcagtcaactactgccattataactttgtagagcatagaacattgatttatgtctcaggctcttatgcagttggtgcgaagcaagcaactgtattcctctaaaactgtaattttaattactagaggctcttatgcagttgttgcgaagcaaacaactgtattcctctatacctgtaattttttagaagatgaacctaatagtttcccatctattaggtaagtcatgctaacccgcaaagtggaaagcatgacttagtaatcggttgttgcatcaacatgcaaccgtaaaccttatttaaagttgcttcttgtggctctacaagcgaatgcagttgtccgttaactacattcacttagatgcttttactgttttcacctcaactaaaacttcaaaaaagttgcagaaaacaaatcgtaattattacgatttgattatatactatattagttgagaatcattgtcaataaaggttgtaaatgaaagcacatttatattttgataatccttccataaacttcgtattctcagcacattcaagttcttttgaaaatttttatcaataattgagtagaagttccgttctcgtcagttcaaaattttacgtaagttgtctctgcgtattggtttagtgagaataacccacactagtggaaacgtccttttgttaatctacaatggacatccttgtctttcgctaacatttcctattaccaatcctgtaacggattttcatcgtcaagttgttctccatgcaatgcgcaccaaaaaagcttcgtacaatttcgtacaaagctttaaaaattcaaataaaaatatcattattttaatgaactagccatatcagattttatttcgtttgctaatacttgtaattcagggaaataattattagcaaagccaattattattttattttttacaaacgtgttaatctctcgatcttctggaatcgtattttctattaaattcaaaagctcactatgacttatgttctctatacttactgtatttaaatattttaaaatcgcaagatacaattcatcaaatacttcatgttcaaaatcaaagtccaataataataaactaacggaattagtttctaactgattatctccaattttatctgcaatctctcttatagcttgatatagcaatctaaaactttctttttcttttaacataaaattctccttaatttattagaatagacaaaatacagcttattttaaagatactccaaaagtttgaactcgagattctgataaattagatgcacgacctacaatacgttaaaacaagctttaagcaatacacttcaaatgaacaatatgtgattttcaaagattaattaatctccgatttaaatgtctgtcattgcgacaatatacatacattgcctacttcatgccaaattattttccactggatatcgattttaaataattattccaatgtccgcttccacgaatcatcactcaacatctcgccaggccatgtgtaagccataacaccaccgtcaatgcgaattgtttcaccagtaataaatgaactctcatcagatgctaaaaagacaacgagcttgcctacttcttctggtttacctaaacgtcccagcggtgtcatccatttctgattttctctgaatgttttgccttccttatcttcgctagtacctgtcagtttatctactaacggggtttcaatcgtacctggtgcaatcgcattagctcgaatgccatctctaccatattcgattgcaatggatttcgtaaaattaatcactgcccctttcgcagcattatatcctgagcgatacaaatctgctgcctgtcctgaaaatgaagatgtgttaacaatagaaccacctttagtcatcattaaaggtaacatcattttcgtcatcaaaaatgttccacgcatatctacattcataatcttgtcatatacatctgttggatactcatgaattctaccagcagcattgtcaacgcctgcattattaaacaacacatcgattcttccaaactgttcctttatgtcagacacaaagtctaccacttgttgttcatctgaaatatccacagtatacgccttcgcattgtcaccattacttttaattttatcgacagtctccgataccgcttcagctatgtctaccgccaatacatacgcaccttcttgagctaaagcgattgcagaagcttgtccgatacctgtacttgctcctgttacgactgcaactttattttccaaacgtttcattcagtcactcctatacaacatatcttaaacttacagtccttatttcccactgttcaatgcttcataaacctaatagataagtctccaggcagtcttagctgctctctgctatacaatttctattgaataactcaaaatatttaataatattagatttttcattttctgaaaattgttacttttgagagtattttttgttacactttaaatatttaacaaagggggaatcattgatgacatcaaaacatcaacaaaaggggtctatcgtcaatcgtttcttgaatagtgttgaaaaaattggaaataaattgccagatcctagcgttttattctttttaatgtgtgtgggcttagccattatgacgtgggttatctcattatttaatgtatctgttaagcatccaggtacgcatcaaaccatttatattaaaaatataattagccatgatggatttacgatgataatgaatgatacgattaaaaacttctcagagttcccagcattaggcttagtactagcagtgatgattggtattggtgttgcagagaaaacaggatacttcgacaagttaatgatttctgttgtgaatcgcgcaccacgtttcttaattttaccgactattatattaattggtattttaggtagtacagccggcgatgctgctacaattatcttgccgccgctcgcagcgatgctttttattaaaattggctatcaccctatcgctggactaacaatggcatatgcttccgctgtaggtggctttgccgcaaatatagttgttggtatgcaagatgctttggtctattcatttacagaaccagcaacacgtatcgtttcagattctattaaaacaaacgttgctatgaactggtactttatcgcagcgagtgtcattgtattacttcctacgatattgctagttacaactaaactgattattcctaggttaggtcaatatgatgatcgtttaatgcatgatgatcatgaagaaacgtcttcacatattactgacaaagaagcacatgctttaaaatgggcaaatatcagtttcatagtcacaattattttattaattattacagccattcctgaacatagctttttaagaaatgctaaaacaggcagcttactagacgatgcgccattaattaacggcgtcggattaattattcttgttgtatttttagtacctggattagtttatgggattttaagcaaagaaattaaaaatacaaaagacttaggtaaaatgttcggcgatgctgtaggatcaatgggaacatttatcgttattgtgttttttgcagcacagctacttgcgtatttaaagtggagtaatttaggaattatcgctgctgttaaaggtgccaaattattagaacatcaaaacggtattgtattgatactaggtattattgtactgagtgcaatggtcaacatgttaatcggaagcgcatcggctaaatggggtattttaggaccgatattcgtaccaatgttaatccttatcggctttcatcccgcatttacacaagttatttaccgtgtaggagattcaattaccaatccaattacaccgatgatgccgtacttacctttattattaacttatgcacaaaaatacgataaacgcatgaagttaggtgctttactttctagtttaatgccgtattcaatcgcactaagtattgtgtggacagtatttgtcatcatttggttcttattaggtatccctgtgggaccaggtggaccgatattcgttaaatagcagtattcaaagggataaattaaaatgccactatacaagattcgacctgtatagtggcatgatttgttatgatatagcgttcgagatgaaactctgcatttatatgaacaattatagtctatcactaataatatttaatctgttccaaccgttaatttggtttacaacaaagacaagatcaataatttgttcttcatcataaaatgattttagccggtcaataatttcaaacttcttaaagtctttgattgaatttaacatttctgcaaattcaagcgtcactttttcttgatcagtaaataaatctaaatgtctaaaactcaagacttcatcaattttcatttgtgttacacccaattcctttaattcttttttatggatatcaacacaataatgacaaccgttaatttttgaaattaataacttaatcaatgcactaagttcatcattaacgggtgattgatgaataaacttttcaccttggctcattacagacattaactctccattttgtttcttgtaattatacggcatttgcaatctctcctttacattgtttaataccaatccagtgatactacacttcgaacaatattggatagaatttgaaattctgtataacatcttgtcaatctatgctttagttaaaacatttagcgcttatatttaaaaaatatataaaatatgaaaacagattgaaaggatattataccttgctctacccttttttataaaaaatcacacacatttgagaaaatttgataatgtcaataaatcatgtcatcgccattgttattcggtatataatgtttttataatggctaaactattatttcatttacattaatggggttcgcttgtgttaatgtactgtaaaaaactggggaagtattggtgatgatgaagtgatttatattaattgcgaaacaccttcgatagcaatgacatagattattggaagattaaatcaaaaataaagaagaccctagtggccttcttttttgtctaattcttctttgattttttctgtgattttaattcctgtgctggttttagtaattcacttaatttttcactttctatcatatctccaccaaattgataattatgttctggagacccatatgcaacaaaatcagcttttttgttttcattgatgtaaccttcaattacggcatcgcccataggtcctgtctttaaacttgtgaaatgcacagatttaatcgtgtttggttctttagtattatgcttaagatagagtgtaatacgttcttgttgttctttgtagtaaatcgctttttgtttttctttttcatcatatttcacttttaaataaatgactgtagcaactatacgtatacataatatgacaccaataattataaaaacatgttttttgttcattaaagtaactcctaactttagtgactctactttttatttagttctttttttatatcatcaggtgactttctttcatgtgctggttttaataatttatctactccttcactttttatcatagcgccaccaaattgataattatgttctggtgtagcataagcagtaaaattatcttttttgttttcatttatgtaaccttcaatcacagcacttcccataggacttgtttccaaatttgtgaagtgtacagatttgatcgtattcggttctttagtgttatgcttgagataaagtgtaatacgcgcttgttgttctttataataaattgcttttcgtttttctttttcgtcatatttcatttttaaatgcatggccgtaacaactatacatatacataaaatgacaccaataattataaaaacatgttttttggacatttaaccacctccaacttttagtgactcttctttttgtttagctctttttttatatcatcaggcgattttaattcctgtgctggttttagtaattcacttaatctttcacttttaattaaatcaccactaaattgaaagttattttcaggtgatgcataggcaacaaaatcatcttctttattttcatttatgtaaccttcaatcactgcacttcccataggacttgttttcaaacttgtgaaatgtacagatttgatggtattgggttctttggtattatgcttgagataaagtctaatacgcgcttgctgttctttataataaactgatttttgtttttatttttcatcatatttcattttaaaatgtatgactgtagcgactatacatatacataaaatgacaccaataattataaaaacatgttttttggacatttaaccacctccaaaatttagtgattcttctttttatttagttctttttttatatcatctggtgactttctttcatgcgctggttttagtaattcacttaatctttcactttctaccatatctccaccaaattgataattatgttctggagatccatatgcaacaaaatcatcttctttattttcattgatgtaaccttcaattactgcatcgcccataggtcctctttttaaacttgtgaaatgtacagatttgatggtattgggttcttcggtattatgcttgagataaagtgtaatgcgctcttgttgttctttataataaattgctttttgtttttctttttcatcaattttaatttttaaatagacacacacaataataattaatataattaacataatactaataattattgtttttattttttcgacataaatagtaaattcctaaagtgaggtggagttttgaatagtatatatgataaagatactacatatcgtgcacttgcaaaagaagcatatcatttagaaccggatcaagaaaaaatttttgtgccttattcgaaagagaaaaaaattgaatttagaattgtagcctttcgtcaaaataagtttaatggattaaaaatggcgggattgtcgcctgttgaaaaaggtgcaaaattgaataccgatgaattatatatagtatatgccggcacagaccctgatttgttagcagatttcggctctgattcaattgaagatttaaaggttggaatggcaaaatttggtggtggtttaagaataccaccaacgaaaaaagaacgcgcaatttatggtaatctgaataaaaaaatgattgattatgatgatgggatttctggaatttcgcaaaatattatgaccaatccaatttctcaaagtaaagagtcatatatttttacaggtgcattaattaataaacaaaaacctaaacatgtatatggtgctgcccatagtttgggtggcggtttagcattgttaaatggtgtgatgtataattttgatggtgtccgtgctttttcagcaccaaatacgtttgatttgttaccagatgaagttaaagcaaattatcgttctgaaaagtatgatggcaagtttataaattatctccatcgttcagatataattggtaattcagacttgtttgcacagcgtataggtacacaaatttatggcaaagatgtagggcgttttagtttgttaaaccctattttgggtcatggtatggatacatttgaatttaaaggtgataatgttcgtatcaaaatggatacagaagaaatgtcaaaaatagcaagtgatttgaaagcatcttgtgaatttgtaaatgatgcgattaaatcttatcaaaagtatatggatgataccaaagcagctgcgaaacgaattgaaagaaaatatacaaaaaaaataagaacaggtaattataagcatataaaaccatcagacatagaggattacatggaagaattatctgtatcgggaaaatatgaattttataatgataccgcatttgaaacagttatgagtgaattaaatcgaattcgaaagaatgttgaatcatttgcggacaaattaaaacatgctggcgagaagatggaatcacgtgataaagaaataggtgaattatataaaatatttgagaggtaatgtatatgggttttttagatgatcttgcggaaagcatagaagaacaaagtgatttatctgaatttaaacaagctatgaaaagtgagttacaaactaaagtggaagaagctaaggcaaaaattgaatctattgatgaagatatttgggattggcaaacgacagtaaataataagagagatgctatcgaagaatattgtgaaggtaaaacggctgagcatgcaattgaaagactaatgcaagataagcaagatatcgcaggtatgcgatggacagcagaagatgcagagaaaagctgtaaagtgggtagttggttttggtaaatgttaactccttttaacatttttaaatgcacaattctagtgttatataataaatttagtgagctatctacgaagaaattagtgtttagtgattattaataaattctcttgaagtaaacgcacaaatgattagaacaatcttactacttatttcaaaaagcaaacactgattattataaagcagataattttcatttcaaaacatatttgatgtcaatgaaatatgttttgaattaaaataaatggttgtttttgttgctatacagaatcagccatttttaatttaattcattcatcattgaagaaatgaattaaatcttgatttgtttttacagcttattctacactattaaatttaaaatgcttatttcctctaaaaatttcactttttattttatcccatacacctttcatatgacctttatcgttacatttgctaacatgtggcatactttgaatcatgctatattcacccaatatatgtttgaatatttttgatgtataataacatcctcggtcactatgaaataaaatacctttggtattttatactttttggatcgcttaattgaatgttttgaagactaattaattattgtttgaagggccaagctcataactaacaatgtgtttgggcacctaaatcataaatggcactcaattaaagcttactaccgtctttgattttaaattcagttacatctgttaaccaaactttattcggcgtatcaatgtcaaattatctattaagtctattttctgatatgatttgtggcgttgaacgtcgataaggtgttcgcttttgacgtattacagcctttaaattaagttctttcatcaaacgataaattcgctttcgttttacttgtttacctagttttaatcgaatataaatataaatacgacgatagccataaatacctttatacttataatagattgattctatttcttgcttaagctgttcattctctaattcatgttcactcggttgatgatgtacccacttataataactcgctctagaaatgcctaaaatacgacactagtgttggatagggtattgatgttttaacgcttcaatcgttttgtatgctgcgatttgttttctctttgaatcatctctctttctaatgcttgaaacttttttaaaacgtcattttccatttctagtaatcgattttgtgcttttaatgcttgaatttcagcttccttttgctcttctggcgtcatcatagatttgggttttcctttgcctctgccatctattaacccatttttaccatgtgcttgatacttttgggcccactggtatatttgaccgtatgagatattaaagtgttctgcaacttctctataagattgtttatgattaaagtaatattcaacaattgtgatacgttcttcaaatgtggtttttcttgctttcatgatatacaccctagatttcggagattgattcttaatcacttttcctatagtatacatttttatccaatttttgacttgtgtcgagctacgaattttgtatttgatggcgagatcttgggttgattgatttgaattcaaatattcatttacaacttttaattttagttcctttgaatagcgattgtattgttattgtgtaattagtgcttcaataccatggggggataatatttatacttaggatacaaagtattgacattaatatctaattgtaatgtatcgattaggtattgaaacgatacacctttttcatattcttgaaatatataaagcagtacatctatgtctactttaggttttttcggcataaataaagttcccttcaaagttttcattttttcaatgtctactttaaagggaacatttcacctctattattagtgtattagtggtctttcttgttgtttagttcttctttaattttttcaggagattttaaattttcagcgttctttaattttcctaagacttcattacttcctgtcaatcctccagtgaattgatagttttcttcaggtgaattgtaagcaataaaatcatagtcttttttactgttaatgtatccatagatttcaatatcacccataggccctgtttttaaattagtgaaatgtacagttttgatggtattgggttctttagtattatgctttagataaagcgtaatgcgctcctgctgttctttgtagtaaatttctttttgtttttctttttcgtcatgtttcatttttaaatagatacctccagtaactatagaaatgcataaaataacaccgataattataaaaatagtttttttgggcattaaaccagctcctaattttaagtgaaagataaaatttttatacttctatggttatgaatgttatagattaaagattataggactaaactaatcttctccagtaacctaactattatcattccctataattgagcattaaattaaaaagacaattaccaaatactctcttacaattaaatatagtttaacaccttgctaacaaaaataaaattaaacttattttccaatattaaaaattttaaatacatgtgtatagccaacctatttaaaatatcttaattatataattgttaaataaaagaacacactaattctattgatttaaagtatctatatatcatttcaatcgcacaataattcatatttatagctattacattaaatgtctatctcccacacctcaaacacatttttatacaggacgcactgtaatttcattcacgttaacatgctttggttgtgttaatgcatataatactgcttctgcaatatcttgtggttcaagttttttacggtctgttggattgtatgcggcagttatggctgtatctaccattcctggtgaaatgcttgttactttaacgcctgtctttgccaactctttttctaatccttgagtaatagtgtgaactgctgctttcgtcgcactataaatcgtactgcttttcgttacttcaaagccagaaatagatgcaatgttaataagatggccacttgattgttctaacatagttggtaatgcagcctgtgccgtgtataaagtgcctttgatattcacatcaatcatgctatcccactcatctacttgataatcagtaatcttagacgacaacatttgccccgcactattgatgacaatatccaaaccaccgaatgtttgttgtgcaatttttatcaattcatcgacttcttcttttttcgttacatctgttggcactaccttcacactatcttgagctaattgattcgccacattttgtagtttatctttatttctaccggctaagatgactttcacaccctcttcatgtagtaatgttgcgattgcttctccaataccactacctgcacctgtaactactgctactttatctgttaatactgtcataatgatcgactcctttgattctttttattttttcagggtaaatcataaatacatattacttttaaaaagcgtatcacaattcatataacggtcataataactcgcttcattttcatagataaattacattacaagccattcgaaacatacaattaatcgttacttatattttttatttttaaaaatgttgaaaaatcgtcacttctttattgtaaaaacattatattagtactaaagttaatactgtgatttatcattcgattgaatgattagagggaggaataaaacatgacatatcatgagcgtgttttagcattaagagcagaaagtaaaagaaccgcatttgattttcgattcgaagatttatttagcaaagaagaatggctaagtatgtcgcttgcagaaagacaaaaagctgaaaaagcatttcgacacgaagttaaaaatatggacgatgtaagaatgcccttctcaagtgtccatgacgcccaagtaaaattatataatgttgtatattcttataacggcattaaacgtaattttaaacaagttgaaaatgaaggattctaatatcatttcgtttatatatagcagacatgatagaattttatatttaaatcttgtaggtaatcgttttaaaaataatataagcatgactaaagccacatccaatataggacgtggcttttagtatcgttccagatttgtggggagttagggtttacttaattaaaggggtctgccctcaattgctcaccaacgagggcaagttacatcaatcacacttcaattgccgccgactaggggtagtaatcattggcaataagaactagttagtgactaacgatttacgttccatagcaaagtgatacaaacgctcagcatcaatgtaaggcatagaatcaatagttaggtaaccatctttgatgtcaccaattaatccttgatttacaccagtgttcacgtaaatatcatagctacttacgtctgagaaaataagcgcttcaatctcttttctcataatcatcactccaatgtttatatagtatttatataaactctctcgtctctctatttattaacttcttacaagtctaatattacatgaatttccaaataaataaaggggtttgtgatgtatttcacaaatttatcactattttggaaaattaagaaatagttaattatataaaagtttaataagtaagaaaatatgatacaatgtaggtgttctttagacattaaaagcttctaacatgatacggaatttgagattcccatatcacattagaagcttttttgttgcggtgcataatggcatgaatgaacgcatgctgtcttaacttcaggaatcggctagaatattaaacttccgttctttgaatattttttaatttcttactaatatcatccagttcattcttcgcctttttaacccaatctccttgagctacattatcaaattcacctttaaattttttgaaatgactactcatttgatttattaaaagttcttcatcatttttcaatttatttttatggtcatgatgaattctgttatgctcgggcgcaataactgcagtaatctgtctcatttgcaaaacagcattaatactcggcccgcttggtaacctttcaacaactgattcataccacacctttactctctacctcccattttttcaatttcttttaaatattctcttttaagttcatctttagaacgttctattttcatctcttcatttttaattcgctgggtcatttcatcattaaactcgtttataatatgcgtcattttaacgtttgattcttgactataatccattttgtttttcagatataaaaagcaatcgtatgaatattcacaatccaactttatctgatgcttaatttcctgaagttgctctaatttatcgttcaattttcttctttcttcatcatatgcagtttccaaatcacttaatttcttatattcagtaaacattatattacacctgctatctgactcgctaataattggtcattacctacaattgcatttacactatctttaattttagagacgtagttgtgacaatcactatttatgtcattcaattcttttaacttttgttcgattttggttaaaggttcagtctcaaacttgctttcatacgcatcaccatttcttaatgctgttagtactccgtcatgcgaaagttttgttcctattttatttccagcttcttgggaattcttccaattctcttgaaatttgtccttcatattatcgtacatcttctccagttggttactttcctctttaactaattgacttaatccctctgctattattaatgctgaaacagattccaacaattttagttgagacgaggttaatgctccaccatttgcttgaagccaattcactctaagttcttcaactttccctaattttgatttagtattgtcttttacagatttaaatgacttattatttgcgtcttcgtatcctttgacttttcttaattctgctaaaattttagcttgtgcatatttccttaaaaaggctcccatatcatggccttcgccattgttcaaaactattttctcaccagctgtatcatacataaactgactaacaaaaccatctaactcatctttatcagaaacaaaccttactatatgtccgttatagtttttcaacatttccttaatttctatgtcgccaatcgcactgtacgtcatattattcagagcaattatacgaaaatctgtaattgataatggagcaggattatatacaacaatatttttgatatcgttactaacgcctaaaataattgcatccctaccgccaagtgagtgcccagttattgtgtcaatttcatattcttttttgatatctttaataaagtcttgcgtatctttaaaatgtggatctttatccgttacagcacctagaccaatgttggcgtctgctccgaaatctttcaacatttccttcatatctttcatatcttgatcggagtgattaaacggatgtttcaagacatttcccatttcttcaaaatgtaaatttgtaccagtcatgcctaaagttactttgccagtgtctttatttttgaacgcagtcgtagttgtaccagtgtttggatcagtataactttttaagtatttcaagtttttaggaaatttaccttcctctttaagaccctctatttgttcattgattttacccttttttaaaccactgttattagcgttttctatttcataactaattttagatacagtacttgtttcttcagagttagcttttatattgcccggttttatttgatattcagtttgactcataaattgttatcctcacttggagtatattgtacggaatctgtaaaatagatgttttcttctttgttttctacaaaggtaaattctagattttttgatcctactgatgaaccttttaaatcgccatcgcccttcaacaatagtttaggagctttcttagtaggtatatcatacctctttctaagttgcttaacattgtagtcatcattacttaattgatactttgctgaataacttggcacattcggattatatgaaatgtcaccatctttataatcattaatatctttaaagttgccatattgtacaaaaaacttaaagtcttcaatttcttttcttaacttctcatcatgtattggtttcattggaacgattctattattttccattttcaccggatattttttatctttactgtctgaataccctttactatcctcggttatttctctaataacaaaattacctttcgttgttctagtattacgatttatatagagaaccattcctctagattccatattcctaccatttgtctcaattatcattttagagtgaattatccaagtgcctttatctcctttttcaaactcttcgtcacgaaagccttctttatcataaaagtcttcaagatttttggttggatataaactcaatgttttgttgaaattttctttaatttgtttatctttactactttcttcttttttcattccacaaccccctataaaaacagatagtattattaagcataaacacaattttaacttttttgaatgaatcatcatttctccaccttatatttttaatactgactcaatctttaatttatacaactaaaacgaaaaattgtttttaacaaatgaatttaattataaatattttgtatttcaaaccttcttataagaattataaaacaattaaatcaaaagataaagtttgtatgatttacaattaattcctggaattatctttattatcttttacctaattagagcattatgaaaatttaactccaaacttcaattaaccctattcagtaggtttgaaattaatactatccgtaaaataaacattttcttctttatttcttataaagttaaattcaagttctttagaacctacggatgagccttttaaatcgccagatcctctcaattttaattccggcgcccttttggttgatatatcatatcgttttcttaattgttggacattataatcatcattattcaattgatagtttgcggaataacttggtacgttaggattgtatgaaatatccccatctttataatctttaaaatccccatattgtacaaagaacttaaagttttcaatctctttttttaacttatcatcccttatgggcttcgttggaataatttgattatgttccatcttgacagggtattttttatctttattatggacgtatccttttttgtcttctgttgtctcacttattaaaaaatatcccttagctgttctagtgttacgattgatgtaaagtaccatcgctctggattttaaggctcctccttttaattggatgttcattccagaattaataatccaagtccctttatctcttttatcaaattcttgatcgcgaaaaccttccttatcgtaaaagtcttcaagattcttggttggatacacatttaatgttttattaaatgcttctttaatttgagcgtttcgaccatttgtttttgtcataatgacataacctacaatcaatataatgagtaataccaaacatataccgagcgttaatttctttgaatgaatcatcatttctccaccttatatttttaatactgactcaatctttaatttatacaactaaaatgaaaaattattttgaacactttatgaaattttcatttcaaacttctattaatactattcagtaggtttgaaattaatactatccgtaaaatagatgttttcttctttattttctataaatgtaaactctaaatttttgtgtgctatagatgatccttttaaatcaccatcgccttttattaataatttaggtgctttcttagttggtatatcatacctctttctaagttgcttcacattgtagtcatcattacttaattgatactttgctgaataacttggcacattcgaattatatgaaatgtcaccatctttataatcattaatatctttaaagtcaccgtattgtacaaaaaacttaaagttttcgatttcttttcttaatttatcatcagctatcggtttggttgggataattttattatgttccatttttactggatattttgtatctttactttgggcataccctttactgtcttcccacaattctctaacaataaaattacctttcgttgttctagtatttcgatttatatagagcaccatacttctggattccatttttttatccttcaactcaattaccatctcagaatcaacaatccaagtgcctttgtcgcccttttcaaactcttgatctcgaaatccttccttatcataaaagtcttcaagatttttagttggatacaggttcaacgttttggtgaagttttctttaatttgtttatctttactactttcttcttttttcattccgcaagcccctataaaaacagctaataatactaaatacaggcaaagcctcaactttcttgaatgaatcatcatttcacatcccccttgagtgatttatcacttcaggttatttttgcttataatataatatcagatttatgctatgtactttaatttttttataaattaagatactctcataaattaaaagctcctaatttgatataggtttttcaatcctaaaatcttatcagaagcttttttattttaatatttaattttaataataattatgtgaataggtaaaaaacaaacaatactattatctaaaactacacatttatattactcaacatattttcataatagtttctaacaaacatatttccatcatatttttctattaaagtttgatataattcctttttattattaagttctgttgctggatagccatagttattccattgtaataactgtatatgtaattcatttaacatatcttcaaaactaataacatttgaactatttagataatttttgtcaataacagactttgtagttacgataattatattatttttttctatcagctttaatgttttttcacttatactttcatctaaggttaccaaatacatttctttagctttagtcctagacatctcatcgccgacttcttgccatctttctctcaaactggtctttgtgctaattaaactggtatttcttttatttaagttatattctgcagctccaggcactacacaatcaactaattttgctagttctgaagattcaaaaactccgctcccaatcgaaccttgagttacaaattcaatgttggctcccattaacaccaattctattattgattcaaattcttttccagctctggatcttctactttgtgtattagataattgtaaagcatatatttcgtcagtatgtttagatgtgaatttttcaatcccttctttaacagtcatgtttttataattttcactatcttgatctaatagatgagaataaagctttttcgaaaactctttctctatttttttaaattcaatccagctctgatttctaagttcatcaataattatactggcattatcgtagaaaaattgctcattctgtttgtgatatcctaatttttcaaagtttttatataccatatcaaatggacttggaagtaatttagatctctcaacctttatagtatttttaaattcttttaattggttattcaaattagtcatcccttcatttcatttgacttatactctttttaaatataaaatgtgtcaatgaaaggacattacgtcctatcatcatcacaaaggaagcgttttaaatgtataataatattataacaaaaaatgaaagcgataatagtatccctttaaattatggtgattttattaaagaaaaacgcaataaactcaacatgactcaaaaggaattagcagattctataggtttacctaaatttggcgatagaacaattcgcagatgggaaaattatgaaacatcaccttcatatctagaatataaaacaattatgaacttcccagataccccaccttatttaaatcctaatatttatgattataaaatgattgatctttttgctggtattggaggaacaagattaggatttcaattacatggcaatgttaaatgtgtttttagtagtgagtgggataaattttctgcaaaaacttacaaagcaaattttggtgaaactcccaaaggtgatataactcaaatcattgcagatgaaatacctacccatgatatattagttgctggatttccttgtcaagctttttcccaagcaggtttaaaaaaagggtttaacgacactagaggcactcttttctttgatattgcacgaattttaaaggcaaagagaccaaaatgttttttacttgaaaacgtaaaaaatttacgctcccatgataaaggaaaaaccttcgatattataatgaatactttgttagagttggattacgatgtatcatcatcaatacttagagcgagagattttggctgtccacaaaatagagaacgaatttatatagttggttttgataagcaacagattaaaaatgccgaaaatttttcattccctgaaccattaccaatagaaacttctttaggtagtatacttgaaagcaatgtaaatgataagtatacaatatcagatagactttggtatggtcatcaaagaagaaaaagagaacataaagctaaaggtaatggatttggatattcaatatttaatgagacaagcccttatacaaacaccttatctgcaagatattacaaagatggtagtgaaattttgattgagcaaaataaaaaaaatcccagaaaattaacacctcgagaagctgcacgactacaaggatttcctgaaaactatataattcctgtaagcgatactcaagcttataaacagtttggcaattctgtttctgtacccgttgtacacgctatagcttctaatattttccaagtcttacaacaaaataagaataattaatgctttgcttttaaataagtttatttagcctatcacaatgatacctgctttccgatgttctttttgtgataggctgtgttttttttacttttggggcgtatttctttataattcattacataaatgtaagggctttagttttcatgttttattaagtctaactgagattttgaaaggatgtttagcaacaatggataaagaattatggatagaaagagctaatgatagtttagttaaacatttttatgagcagcaatctgacattgaacagcgagaaggttttgaaagtaaattaacgtttggtactgcgggtatacgcggaaaattcggtcttggtgaaggtcgacttaataagtttactattgaaaaattggcattaggtttatcgcgttatttaaatgcacaaacaaacaatccaacaatagtcattcattatgatattagacatctttcaactgaattcgcccaaattattgctaatgtattagcaaaccatcaaataacagtttatttacctgatacatataaaacgacaccggaattatcgttcgcggtgcgcaatcttaatactactgctggcattatgattacagcaagtcataatccgaaagactataacggcattaaagtatatggttctgatggcgcgcaactatcaacagatgcatcagaacttgtaagtcgctatattgaagacgttggcgatccattacagattgatatatctttttcaaaacacaattcatcgtatatcaaaccgttacctaaatctgtagcagaaaattacattaaacacattcaaaatatgattggctatattcctaaatctgatttacaagttgtgttcactagtttgcatggtacaagtgttccaattgtacctgagttattaaaatctttgaatttcaatcaatttaatcttgtagaagcacaatgtaaacctgatccgaattttagctcagttcaaagtgctaatcctgaagatcatcgcgcttttgatcaagcagtcgaacttgcaaataaaagtcatgcagacttattaatatcaactgaccctgatgcggatcgtcttggcattgctgaacgtgatgcacatggtcatatcacatattttaatggcaaccaaattggtgcgttgttacttaattatcgtattcaacaaacgtctcaattacgtcatcgcttaatgattcaatctattgtaagtagtgagttaacaaagtcattagcacgctataataatgttgaatacaaagaggtgcttacgggctttaaatttattgctcaggaaataagacaacttgatgatcatcaaaatatgattttcgcctttgaagagagttacggttttctatcagagccttttgtacgtgataaagatgccgtacaaattgtgccactcattataaaatacgcttctgagttaaaattatatggcaaaacattgaaagatgaattagaacagatttatcaaactgttggtagacatgaggatacattattctcgcatacgctagaaggattagaaggtaagaaaaaaattgaatcaattatgacacatttccgttcacatccaccgcaagagattcaaggactgaaagtgaaagcaattgaagattatttaactagcgaggttcatcagttggataaagatacaacgtcgcagattaattctcctaaatcaaatgttattcgtgtcttatttgacgaaggatttatcgctttacgtccttctggtactgaacctaaaattaaattatatgtgtcgttaaaatgtccgaattttgatgatgtagctcaaaaaattaatgcgatgatttttagctaattaaaaattttatacatcgaaatattacatttcattttatacttatcagcccttttgaaactagaatccttatgttttcgcgttttgaaggggctaatttgtaataatttttcaaaagtatattagaaaattaattttcatgtatttttcatattaagcggtaataatataataattaataccgcgacctatttaattgttttcgcgatgaaaaaggtttagaattacaaaaataactattttaaatttagttacaaatatattttagaaaggatgtgaaataatgaaaggctctaaacaaatacttttgattatgggcattatatctcttattgttttatttatttttacactattcatcatggcgcaatatgcaaaacattatgaacaaaaatccgacagttccaacgcacatactttaaattcatcatcagccataattgagcaacatactatgtcgaatttagcgtctctagatttatacgctcctgttcgtaacattacttctagtcgtgatattcatcccatttatttcatgacaaaagattaaaacttcctttttcataaccccattcattcaactaataaattaaaaaatgataaaagcgtactgttttttagaaacatacatatataagaaacacatccattactaaaagacagtacattatattctatcgggaaggtgcaacaatgaccgtcaacatcgtagtctctattgtgttttgtatcagtatggttgtattaagcatttatgtcgcaataactaaagatttcacactaatttcttatataaatcaaacgaccattgcagataaacacaagaaccaaattgcatatatatttgcgttatgtatcagtttgagtgcagtatttttaatgtctgcaattctatgctttgaatatgattttattgcattggcattcttatttttaacgatagcattattacttatcgcattattctacgtttgcttttataaaattacaaaatacccataaatggttgcgttaaattggtagtaatttttcggtgcgctgtcagtaagcaattgtttgcgaaaaaaaatacaaccttgtacgaatacaaagttgcattaatatagaatcatttatgctttttaatgttataaacctaattctttaataaatcgtgttaattcttctcgcatactgtcatctttcaatgcatattctatggtagttttaacaaagcctaatttttctccaacgtcataacgttcgccttcgaagtcatatgcatacacttggttatcattattcatacgctcaatcgcatctgttaactgaatttcgttacctgcgccttctttttgcgtttttaaataatcgaaaatttcaggcgttaatacatatcgccccataatagctaggtttgatggtgccgtaccttgtgctggcttttcaacaaactttttcacttcatactgacgtccatttttagttaatggatcaataattccataacgatgagtatctgcttccggaacttcttggacacctataactgagtgccccgtttcttcataaacgtcaatcaactgtttcactgctggcacttcagattcaacaatatcgtcacctaataataccgcaaatggttcattgccgataaattgacgcgcagaactaatcgcatgccccaaacctttttgttctttctgccttacataaaaaatattcgcaagttccgttgaatactgaactttttctagtaattcagatttacctttttcttttaaaaccatttctaattctttttgactatcaaaatgatcttcaatcgcgcgtttgtggcgacctgtcactataataatatcttcaattccagctcttgcagcttcttcaacgatatattgtattgtgggtttatctaagataggaagcatttcctttggcatcgctttagttgctggtaaaaatctagtccctaaaccagcagcgggaatgattgccttttttatttttttcaaagttaatgtgctccttttcctaagtattaaatctatgtatcaacgtcattttaacactaattagaacgccttcatagtgtcattgagtatgtaattatttcttgggaaatttgatttaattttaaaaaacaggcttacttcatataatttatgaaataaacctgtcaattttagattgattatgctttgtgattctttttatttctgcgtaataatgctaaacctagaatactaaataatccgccgaacagtatacctttgtttgttgattcttctccacctgtttcaggtagttcagatttcttagattgtttttgtttagttggtgccactgctttaaccttttcattgatttcaataacaggtgttactactttaccttgttccactggtttagaaggttttttaggttcttctttagcaggtggtactggtttaccaggttcagatggtacctctggtgttggtggtactggtgtttccggctcacttggtacttccggtgttggtggcgttggttcgcctggctcactcggtacttctggtgttggtggtgttggtgtttccggctcacttggtacctctggtgttggcggcgttgtatcttcttcaatcgtttgttgaccttcattttgaccacttacttttggaagtgtatcttcttcaaaatcaacactgttgtgtccaccaaattgataattaggtttatctttgtttgtatcttcttcaataatttcattatgcttattgaatccatgaatttgtggcacactgtcgaagtcgatatcaatgatgttaccaccttgttcatacttaggcttgtcttcttctgtatcttcttcgaatgactggttaccattattttgaccatgaatttgaggtacactgtcgaaatcgatatctacgatattaccaccttgttcatatttaggtttatcttcttctgtgtcttcctcgaatgactggttaccgctattttggccaccttcataacctaattcactcttaatatcaacgtggctattttcttcgatttcttcaatcacgccataattaccgtgaccattttcagttcctaaaccagaatgagaaatatgatgattgttttcagtgatttcctcgattggtccttgtgcttgaccatgttcttcaggtaattcatccactaattcgatcaaattactttcagttgtatattctttcgtatcttcaattgttgtatggtcgctcactgcgccagttacaataccttttgtagactcttcgtcaaattcaactaagttagactcagttgttacttggccaccacctgggtttgtatcttcttcatattcaacaacatcagcatgatgttttgaattttcatgtgtcgattcttcaaagtctacatgaatagaatcttcttcagtttcaatggtaccttctgcatgaccttctgcaccttcaacagctgtatgatattcaaaatcaattggcttagaatcgtcactttcttcgactgtaccagtcaattcatgcttctccattggcggctctgatttaaattcaagttcgataggagtactatgttctataataggttcctttggtttatctttaccgtcgccctgagcgttattagagtaaaatgcaacgccattgttccaagttagttgaactggataatatgaataataataattatgataaccggataacttcgtttggaagtttaaatcactagcagacgagttatagtcaccttcatacttaattacataatttttagttttatccaattcactaaaatctaaagtatatccaccatttccagtaagtgttaaacttagtttatcagttacatcttcaaactttgtttcatccagaacatctccataaacactttcagctaattcatccgaaccaatgtgtttatatacttagactgtaggattcttagcattttgtttatatccagatgttacttgaccagttactgtgacagaagttaacgactggttgttaggcttcacgtatgcaaaatggctaaatctaccttcttgcttattcaaagtatgaattcgaccattaactgttactccccagttatcttttacaccgtctaagtattttatgtcgaattgtttagatatcttcttctctcctaaggtcacttcaatattttggttacctctttttgtcactgttgttgggtcgataaataggtttaaatctaactcagcttttaaatcttttttaccttgtacatattctttaaatgtatacctaattttcctttcttcattcacttcacctactgccataacttgaccatctttactttttatatctggcactttacgaagaggtgagataccatgcgtttctacattattacttaatgtgaaatcaaagtagtcccccggtttaataccatcctcgaatttccatttatatttcaaggttactctttctgcattatgaggattaacaacatttgtctctttattgttatgccctactatttcactaccttcttctactttcactttacttgttacatctgtacctgtcaccttagcttcttccactacttctttctctgaagctgctgtaacgtcagctgatcttttcattcttggtttaatttctgagacgttacttggttgagttgtgtcaacttgagttcccactattcccttatcagcagctttttccgatggcaaatcaactcgcgaagtttctgcttttggtgcttgcacagttgttggtgcttcttctgttgttacttgtgttgattgtgatggttgctcagttgatgtcgcgctgtatgattgtgtttcatctattgtattaacgttatttgtagttgtttgtgtttcgcttgctttactttcagtagctgaattcccactttcctctactgtagtattgttttgttccgatgctgcggcttctttttcttgtcccattccaacaacgatcattgttcctaagaatactgatgccgctcccaatttgtgttttcttatgccgtatctaagattgcttttcactataatattctcccttaaatgtaaaattcatttattttttaactcaataaatgcaattctatattgttcggtttttaaaagcaatgaaaaaaagcgagttaataaaaagttaagattgttgttaactttatgtataatgagtttttattatttggaactcacatatatattgcatacaaaactcttgaataccctgatataacaggcttgtattttttatacttactttttaaattaaattcaaattcatctaatttaaaacaatatactaaagtatacataataatcgcctgtacaatgcatcattaacaagttattgaaacgcctttcattgtattaataacgccaatataatttttatatcgttcggtttttgtttgattttaatgattcttcatacagaaacagccgtatttcaagacgacattttaaatttaactaaatttgcatctagttaataattgcatttatcaaatttgtcttattgatccaatctaatttgtacttacaaactagttttaaattctaactttatctctcagttcgttatcaatcatcagacataaacagatgaagcaatcagaaaacactctaattttctattagaaatttgatttaatataaaaaaacaggcttacttcatataatttatgaaataaacccgtcaattttagattgattatgctttgtgattctttttatttctgcgtaataatgctaaacctagaatgctgaataatccgccgaacaacatacctttgtttgttgattcttctccacctgtttcaggtagttcagatttcttagattgtgcttttttagttggtgccactgctttaaccttttcattgatttcaatgacaggtgttactaccttaccttgttccactggcttagaaggttttttaggttcttctttggctggtggtactggtttaccaggttcagctggtacttctggtgtcggtggcgttggttcgcctggctcactcggcacttctggtgtcggtggtgttggtgtttccggctcactcggtacttctggtgtcggtggtgttggtgtttccggctcacttggtacttctggtgtcggtggtgttggcggcgttgtatcttcttcaatcgtttgttgaccttcattttgaccacttacttttggaagtgtatcttcttcaaaatcaacactgttgtgtccaccaaattgataattaggtttgtctttgtttgtatcttcttcaataatttcattatgcttattgaatccatgaatttgtggcacactgtcgaagtcgatatcaatgatgttaccaccttgttcatacttaggcttgtcttcttctgtatcttcttcgaatgactggttaccattattttgaccatgaatttgaggtacactgtcgaaatcgatatctacgatattaccaccttgttcatatttaggtttatcttcttctgtgtcttcctcgaatgactggttaccgctattttggccaccttcataacctaattcactcttaatatcaacgtggctattttcttcgatttcttcaatcacgccataattaccgtgaccattttcagttcctaaaccagaatgagaaatatgatggttgttttcagtgatttcctcgattggtccttgtgcttgaccatgttcttcaggtaattcatccactaattcgatcaaattactttcagttgtatattctttcgtatcttcaattgttgtatggtcgctcactgcgccagttacaataccttttgtagactcttcgtcaaattcaactaagttagactcagttgttacttggccaccacctgggtttgtatcctcttcatattcaacaacatcagcatgatgttttgaattttcatgtgtagattcttcaaagtcaattggatttgattcctcagaggactcagtgtatcctccaacgtgacccgcttcgctatccacagcagtatggtaatcgatatcaatagctgatgaatccgtttcttctattgtttcaatgtatccgtcaacataaccaccttcaccatctatagctgtgtgatagtcaatgtcaagagttgatgaatctgtttcttcttcaacagtagttactaaattcttatcatattgacctgtaataactcctgttcctgttacctcatcaaaaatcaaattattcgattctactttaacaccattttgaccattaccatctgctttattactatataaaactaaaccattatcccaagttaatgtatagtgattattataataagaatagtatctgtaactattctccggatatgcagatacttgagttctaaagttaacttcatctgtttcttttgagtactctcctgtgtaatgaatcacatatgtcttatctaatttttctagattcaactgataatttccgttttcttgtacagttaatttattttgcatatcacttgtaacatctttaaacttcgaattgtctgttaagtttacagaaacactctttggtaaatccgtttccttaccttgatactcatacactttaacaatgggtgaatcaccacttacattactaccttgtgtcaaactaccagtaatagatacactttcagatttatttccgtttatcggtttaacgtaagctacatgtgtgaatttattatccgctttattaaatgtttcaattgacccattcaggtttgtataatactttccaactccatctttatactcaacttcaatctttttttcagtatttttcccatttaattttgaagtaagtgtttcttcaccattatttttaacgattctagggtctataaataaattcaagtttaaatttgctattacattcactttataatcaatataatctgtaaacgtgtatctaatttttccatctccaagaagttgaccagtagccattacgacagagccatttttaatctctggtaactttctcgctgttgaaaccccataagtatttacattatttgataatgtaaaatcaaagtaatctcctttttttagtccatcttcaaatttcaatttatattttagcaccgctctttgacctgcatgaggttctactttatttgtattattatgtccttcgatagagctttcagtcactgtaactttacttgtcacatctgtacctttaatttctgaagcgtcactagcttccttagcttcaactacgtctgctgatcttgtcacacgtggtttactttctgataccgttcttggctgcgccacttcaacttgtgtttctgctgcttgattttgtgtagcctttttaggtgttaaatctacttgtctttgatctccgctattgtcttgagattgtgtcgtttccttaacttgaggtttcgcttcttccttaactacctcttctttaactgtttctacatttgctggttgtgcagtttgtggtgcttgtactgcttttggtgcttcttcagttgttacttgtgttgcgtttgacggttgttctgttactgttgcgttatatgattgagtttcttctatatgattaacgttagttgcagttgtttgtgtttcgcttgttttattttcagtagctgaattcccattttcttctactgtagttgtcttttgttctgatgctgcagcttctttatcttgtcccatcccaacaacgatcattgttcctaagaatactgatgctgctcccaatttatgttttctaatgccgtacctaagattgtttttcactataatatctccctttaaatgcaaaattcattaatttttttaaacttaataaatgcaagtctatattgttcggtttttaaaagcaatacaaaaaagcgagttaatgaaaagttaagattgtcattaattttatgttaattgataattttattatttgaaatatacctataaattgtattcaagtcgtcaaaaacccttgtcacacaaggcttgtattttttatacttatttttaaaattaaattcatcattatctaatttaaaacaatatactaagcgtttcataattatcgcctgtacaatacgcacaaaaacatgtcttgaaacgcctttcattacactaaaataaccaatatactttttatatcgttcggattctaagtatttcagacgattttctacataaaaataaacgtgtttcaaggcaatatattgtaattacctaaaaacacgtttacttaatatttagttaaacaaataagctgatgaataaaatgaagatgatacctgaaacggaaataatcgtttctaataatgaccatgttaggaatgtttcttttacagttaaaccaaaatattctttaaacatccagaatcctgcgtcatttacatgagacaaaatcacactacctgcacctatcgcaagtacaactaatgcaacatttacatctgatgattgtaataatggtaagacaatacctgtagttgaaatcgcagctactgtagccgaacctaatgcgatacgtagcacagctgcaacaatccatgctagtaaaatcggagacatctctgtaccttcaaacattttagcaattgtatttccgacaccaccgtcaattaatacttgtttaaatgtaccgccaccgccaataatcaataacatcattccgattggataaatcgcattcgtcactgattccataatatgattcatcttacgttttctcattaatcccatcgtaacgattgcaaataacactgctattagcatggctgtccctgctgttccgatcatataaatgatagattcaaatagatttgtaggtttgtcatgcccggttacaagttgcgttatcgtagatactaacattaatatgactggtaatgttgctgttaataaactcataccaaatcctggcatctcttgatccgtaaattctttttgtgcacctaacgctgaaatatcgccttctcgtgtatacgcagacggaatcattttttgtgcaactttgttaaatataggtcctgcaatgagtgtaactggaatggcaataatcataccgtatagtaatacatctcctacattcgcctttaattcttttgcgatgactaccggtcctggatgtggtggtaaaaagccatgtgtcactgataaagctgttaccataggtagccctagttttaacactgaaacatttgcgcgttttgctactgtaaatactaatggaatcagtaagactaaacctacttcaaagaacaatgcaatcccgacgataaatgctgcaacaagcattgcccattgtacatgtttttgaccaaatttttgaatcaacgtgtctgcaattcgagttgcaccaccaccatcagcaagtaatttcccaagtatggcacctaaaccgaatatcagtgcaatgtgtccgagcgtactgcccatccctttctcaatcgtctccataattttagtcaatggtatacctagcattaacgctgtaatcatcgatgtgataattaatgaaataaatgtatttaatttaaacccaatgattaatactaataaaataacgatacctaaaacaacactgattaacggccatatttcgttaaacatgacattcccctctttctcttttcaatagaatgtaacaccgtcgtcgcgcacgtattccacataatatatagtagtcatggcacaacaactttatctaagatgcttgagtgacgtatttattgtgttttattttcagccatatgttggcgttgaaaatctgaaatttgttcataattctctgttaaagaacgacttaaattgataaaaatggatacgagctcttgataaacagcgacattttcttcaatcggcgtatgattgtttgtggcaccgaccatcgatgaaacgattgaaaaatcttcaatgtcacctacagctttaagcccgagtacgcaggcacctaagcatgaactttcataactttcaggaaccactaactctgtgtcaaatatatctgacatcatttgacgccatacttcacttttcgcaaaaccacctgttgcttttatcatcttaggtgtttcattcattacttcaataagcgcaagatagacggtatacaaattgtaaagaacaccttctaatgcggcgcgaatcatatgttcttttttatgagataaagttaaaccgaagaatgaacctcttgcatttgcgttccaaagcggtgcacgttctcctgctaaatagggatgaaatattaagccatcagcgccaggtttaacacgctttgcaatttgagttaagacatcataaggatcaacaccgagacgtttcgcagtttcgacttcacttgctaacaactcatcgcgcaaccatctcaatacgacaccaccattatttacagggcctccaatgacgtagtggtcctctgttaagacataacaaaatattctacctttgtaatcagtacgtggtttatctatcacagtacgaatcgccccagatgtaccgattgtgacagcaacttctcctttaccaacactattgacacccaaattagaaaggaccccatcactcgcaccaataacaaacggtgtatcttcattaagccccattaatgttgcataacgttctttcatacctttcatcacatacgttgttggcactaattccggcaacatttcctcggaaataccaagcaattctaatgccccaacatcccaatctaatgtttctaaattaaacatccctgttgcggaagccattgaataatcaatgatatatctatcaaacaaatgatagaaaatgtatgttttaatatctgcaaacttagcagtacgttgaaatacatcttgccattcatgtttcatccaaaaaatcttcgctaatggcgacataggatgaataggcgtacctgttcgctgataaatcgcattgccatcatgcacttcatttattactgttgcatattttgcagcgcggttatctgcccaagtaatattatttgttaatctttgatgttgctgatccatcgcaatcaagctatgcatttgcgcactaaatgacacaaatttaatatcatcttgattaactttcgattccctcattatgtatttaattgtcattaataccgcatcaaataattcatctgggttttcttctgagacatcaacgtttggtgtgtgtaaatcatagccgatttgatgtttcatgatgaaagttccattttcatcatataagactgacttggtactcgtcgttccaatgtcgacaccaatcatatatttcatgacaaatccttctttcttttcattttaattcaaccaaaatccttcaatatctttaccaacatcgtcgaaatttaaatgaaacgcttctttcaaaatttgactgtcgtattgttccactgcatcaataaacacttgatgattatgatgtatgcgttcaaaatcttgcgggttttgttgcatacgttgtcgcatggatgttaaaacgagcgccatcattactggttttaaatgactccaaaatgagtttaaatattgatgattagatgctttgattaatgtttcatgaaattcaaagtcatgcttcgtaaatgattctgcatcctcaaattttactgccactttcatcatttcaagttgtttcttcatttcttttacgataggtagtcgctcttgatttttaactcttgaaaatgcaaatgactctagcatcagtcgcaaatcgtacatttctttcttttcttgttccccaaacggcaacacatgtgcacccattctttctaattggatgagttgattttgttgcaataatttaaatgcatctcgaattggcgaacgactcacattaaattgctttgccatttgattttcagtgagtaacgtaccttcagctatgtgaccattcacaatgcctaagcgtaattctgctgcaataccttctccagttgtcataccttccaaccatttctctggatatccatacatcgtcaaagtcactccttcattacacgacatacttgtatacaagtatgttaatatagttctcaagtgtttgcaagcgctttctttacgcgtaataaaatagtgaccacccctcttcgatgtatatttaaagggaatggtcactatgacacgaatgatttaattgttatttttagtgcggggtacttctaattgttctgtactcatatgtgttttaggtacttcaatgcaataatgcgtttcatgacagtttggacattcgaatcgacgtgttgtcgctgtatgtttcgctttgataactgcccacaaagacggtgagaatatatgctggcagttagggcataaataggcaactttgcgttgatagtagatagtaataccaatgccataactaatcataaatggtaaagcaattaaaaacggccatttatttttcatcaaaattgcacttataatgctagaatattgaattattcctataataccagcactaatccaaatattacgacgaatacttttcatttcagctgatttactcatgacatgctctatgtcttttaaatgtgtgattggagacgtcgacgcttcatttacgtaatattgaacatttttaattttgtctaataccgcttgttgctgtttgacttgttgattaatttcttgttgtttcatagttagtaaggtattgagtgtcttcaaagtaccttcaccttttagcaacatatctatatcgcttaacgcacaacctaaatctttaagcaataagattaactctaatgtttgtcgctgttgttctgtatacacacgacgctttccttctgtaaatccttgtggtttcaaaatacctttgcgatcataatattgaatcgttcgtgttgtcacattgcataattttgcgagttctccagtcgaatagttagacatagattccacctcctacaatcaccatagttgatgacccgacgtcacgagcaagtataatttccacatttttaagaaatttattatactaggcgtcttatttttgtgatttcataccatgttgatttacaaaatcactcaaattaagcaacacacctactaaacgtctactctgttatttcagaatgaatttgttgtaatttatcttcaacttcagtaatctctgtcgcacattctttcaataaatctcgatacttttctgtctctgcattgtttttataacgtattttatgttctaaacttgcccacatatccatacctattgttctaatttgaatttcaacaggcaatacctcaacgcgttctgctaaaaagactggaatggatacaacgatatgtaaactgcggtaaccattttctttagggtgctgaatataatctttacgttttatcaattgtacgtcttcttgtttaagcaacatctcttcaatcaaataaatatcatctaagtaattacatactacgcgaattccggcaatatccagtatatgttctttggcagtttctgcgctaatctgtaatcctttacgattaagcttttctattaaactacgcatttctttcacacgtcgctccatatgatgtatagggttgtgtttataaatgtgattgaaattgtcgtctaaaatactcagtttagtgcttatttcctttagtgctgatgaataaatatgatctaactctacgaaacctaataacgtatcaaatgcttcatcaccattttcaaatttacttaaactatttttaaaatcatgtcgcaaatcctctaaatatagtgatggttttcgatctacatacatttttatacttacctccgatatataatcatatttattgtacctaacattttattaagataatactaatacactatcgaactttgggctgatactgaaacagcgcaaagaaactcaaacaattcgaattatgtatcaaaaccttcaattatgggaagtaattttaaaatgatttaacgcaaaaaaacacctgttaccgttatataggtacaagtgcttaattgatagagatgttatacgtctttaaatgattccacaacttttggatgcggaccatccataagcggttctctttgtcgaacgccaccactttggttgacaattgattcgctatcaaagtacgatttatcttgatttgattgttcttgaatatgttcttcattatcagttgttgcatattcactatccacctctgttttttccattgttgctgtatggaattgtacgaagttctcttcttctaatgctttgatttcttctttcgataacgctcgataccaatctttcgcttttttcgccgcaataggaacaacatctttttcaagatatccttcttttaacattgcattcgcaatttctatcgctttttgccgtttaattacttcaaattctttccatttttcggggtaacctttcattgtaaagggcatttccttaacctccaatatgttataattcatgttatataccaccataattataaaatgaaacatattaaacacaattttttagactcccgtcataataacttcagacaaacgttagtctgacctgataaatattttattttaaacgttcttgtctctctcacgaaaaccattgtgttgaatattcatcattgctgattgaatataattatactgtggtaaatctggtaatatctttatttctaattctgtatttaattctaaatgtttagcgatgttttcaaatgttgctaaatactcgcccattaattgttcatttattgtaagtctatcttcattagccatggctctatttaacataaagctaatttcttctaatgcgaataagctaggataataattttgaatcaatgtcttatcactaaataattcaccattagctgcattataaacttgcgtcatgttatttaatttcacagataggttcatagctgtgtttttctgatacacatcatctttatattggttttcagaaaataaataatgaaagagtgttgcttcttttcgaacaacttcagccattacataaggaagcaatgcggatgcggtacgttgcccaaggacaaataaacctatgattgcaatcacaatccccattgcaacgtcaataactcttggaaacgcaatgttaattgttaagttctgtgatgctaatccgttcattaaaataacttgaattgtaataaaaactactgcaattgtataatttgctcccaccaacgcttcagtaaataatgctgcaatacccattaaaatgactgctacaggtgttggtattgaaaacaacaatataactgaaagtactagcacacctaaaatggtgcctaatccacgtgcaatacctctctcaattgcatgtatagttgatgttcctaataatactgtatgtgcggataaaggtatccaatatgctttttcaaaatcgaacattaacgcgataaatatcgctatcatcataatcgctgcatacctcaatgtatttctaaacacgattgaatctaatgttaaattttgataaatacgcttactatataaaggttttcgcatttcagcttcatacgcaatacgcgcttcatttgcatgcaccatttcgtcaattttcaagatatggttgaataagttttgaaattcttctgttactgttacttctttgcgccaatatctcacatttttattgcgatcatctcgctgtgtaatgatatgatccatcatttcaattaactcatctggcaatggtcgaatttgtttagcattcaactctaacagttcagaataaatcccttgggcagatgtgtgtaataataataatttttggaaacgtccgcttaatttatcactacttgaattagaagtgatgagtagtttatccgacgctttaaaactatccactgcagtctttgctacttgtgaaaatgcagatttatcattgtaagcatgcaataacttagatatgagtttaaaatcgttttgaatggcttgttcttcagctttgtttttagacaataagattgtgatgagtaccatcatagtggcaagtacaccacctactaaaatcgcaaagcctctatataatgcttcttcaggtgctataggtaagttaatgggtaaactgaatgtcacaatgaagaatgtcgatgacggtccagcaattttcaaggcggtaaatatataaaatggtataaccgtaacaattaataatgtcattccaaaaacgagcggcgttgtggctgttagcgtaccaagtatcatgcatattgcaaacgctaaattacaaattattacagttcgcagcttagatcgcgacggacctttaaaaacgtagatatgtgctagagttccggttgcaactaataatccaaattggaaattaccacataagtaaccgatgattgcaggaataatcattaacagtccttgtcttatccctttataaaagtctaagttaagtcgattaatttttataagtgatgtcaaaaagatgtcatttcgacttctcccttcctcgtcaaaatatttccataatcattttattagcatagttaatttgagtatgttgctataaattttatttgtgcaacatatgccattataacaccttatgctcaattatctaaatttaaaaacttttaaagtccaattaaatttattttataatgttatttaacatcagtaaacctattggtcgcccaactttgagcgagttaaaatttatttgtgacatgttgagattattttagtgaattatacatttagggttagaaatacattcacatagacttaatgtctatttacttcatattattcctagggttcaagatgtaaacgatagtgaatttaagaaagtttataaaacatatttgcctcataagcttgaatagttcctatatttgttgtttaaaatgacattcgatgtcagttcatttcttaaaatatcgaaagatgattatgtataatatatatagtgacgtatttacaaataatggcaataagcagtacaaaatgattacacaaaaatttccttctactcgataaattaagaagtataaaataattaaaaaaatacttataattagacctataagaggcaaacttctaatatatttttctaagtttcccttcatatttataacctcctaaaatttatatgtacttttacaagcgttacctgactaaggttttaaaactttatttcttctacatatatcattttaataacttcccattcatcttaaaccatatctgttttaaaatttttcaattttaacgtaaaaaaagcaataagcctcaacaatgtgaaagcttactgcatgtttaaattatttttctattgctttatcatcactaacaattaaaggttgatctggtttcacatagaaccacataatcacagcgattactgctggaacgattaacaattggaatgtcattgtccaacctaaatgttctacgaatagacctgctaatagcggactgattaatgcacctatattaccccataagttcatccatcctgatactgtaccagagaagttacgtcctaaatcagttgctgcagcccaactcatacccattgaaataccgataccaccaagacctagtgataaccagaaaatacttacatataaatttcctgtacgtacagcaaagataattgaaactgcaaatacaataaatcctgcgattgcaatgacacctctagctacgaattttgaacgtcctaatcctaatacacggtcagaaattgcacctgctgataagattaagaagaacattaataaccaaggtaatgaactaatgctcatttctttaaagttaacgtggaatacttctgttaaatacgtcggtaaccaaattaagaataatgtaatgataaattgtacaacaaagtattgaattgcaattgcatagaagctaaaacgtttaaagaaatcattccatggtggtgatgacttttcagtagctacgatatcacgattttccataatgaaacgtttctccgcttcattaaccattctatgttgctcaggtaagtctttggcaataatcgcccataatacagccattaaaatacctactgcaccaaaaatgtaaaatactgcttgccagttaaatgcgttaacaatagcaattgtaactattggtgctaatacaggtccgaaatatgatcctgctaataatgcacttgatgctctacctttttcatttttagagaaccaaaatgagttaaacacagcattagaagggtacattggcgcctcacccacaccaaataagaatctcactaaataaattaaaccgtggttcttaatcatacccgttaagattgtaaatgcactccaccaaactaatgcaatagtaatcatcttacgtggaccgaatttttcagccaacatccccgatggtacttgcattaatgcataacctagagagaagaatgatgccaataaaccaaattgtggttttgtcatccctaaatcatccatcatttgcttagcgatatatgaaatgtttgctctatccatatacgcaataaccccaataaagaagaacgcaagcgcgaacatccaccttacgttagttcgtttttccttcataactattcctacttccctaattaattttttaaaacttaccctgaaacgttaaaattttcggacatctggcatgtccacccctactttgtcacaaaattgtaccaaagttattttttataatattatcagacatggaaagcgtttacaatagaatctataaaaattttattaaattccgcttaacttttgctattaaaacgatataaaggaacttttagttacatagtagcctatcatttgttaattaaaaatactgcaatactagtgttttaaaacgtatattgcaggctttcttacatatttgacattcattttaaattgcataaaactacattgctcattcattgtgcagcgcctgttatttagatgatcatttgttgacttttcgtacttatagcaagcaattttttgatttattgcttataatacattttaagacaaatgcttgtttcaacatcgcatacgacatcattcattattcatttgaatttatccagtttctatttgtctgcaattgctgaaaattaaaggagcctatttttaataatggaacaaattatcactgaatttattagtcgttttgggtatgcagccatttttatattaattttattagaaaatattttacctatcgtaccatcggaaattattctgacatttgctggtcttatgtctgttaaatcacatttatcaattttaaccttatttattattgcaaccatcgcatcgtttataggactgttaattttatattatatctgtcgtttgatttcagaagaacgtctatatcgctttattgatcgacacggtaagtggattaaattgaaaagtaaggatttaaagcgagcaaatgattggtttaaaaagtatggcgtatgggctgtatttatctgtcgttttatacctgtattacgtgtattgattaccattccagccggtgtaaaccgcatgaatgttgtgacatttaccgttatttcattaataggtacaacaatttggaacttcggtttaattttactaggacgcacgttgagcgatagctttggtatgttgatgactggtcttcatacatattcacgtattatgtatgttgtcatcattatcgcagtcatttactttgctatacgttacattggcaaacgtaagagagtaaaataatattgttgtaagcataaaggcatgaattttaaatttctataaacaaaaagcagtaaaatcattccatctattgaaatgattcactgcttttttaagtttatttggcatactttagctgaaagtcacctatttttatataaagaaatattattattaacatgatagttatagttgtgaagtaaaaggctaccaacggctgagaaatgataccaattaataatgcacctacagtcattccaatatatctgacaaaattaaatacgcctagcacttttccttttatatgttcaaatcttttagaaattatagtagccagcaaagctggcacaataccaacacaagtacctaatataaatataattactgataatataattacatttgattcgtttaaccaaccaaacaataacgtaaacatagcaaatccagttatagtaacacgaagtatcattatttcattatatttttttgaaaatcgcttataaaataaacttcctaatataacactaacagtaataggtaaaaacaaaactcctgatattccaacgcctatatcataggtattatttaataatgttggtaaataaactaatattgaaaagtacgtaaaaaatattaaaaatcccaatgtcactaaagtaataaacactttatcggtcaaatatttttcttcaattttttcagttaattttacaatccctttttcaacatttggaatatcaataaaaaagataatcagaaataatacgatagatataacgagcaaaaaactaaaaataccaatataatcccatcttgcgcctaaagtactccctaagattggtgccaaagttggcgcacatgataaaaatatttgatagttcgccatagcttgagctctaccattatctgtacttagtttggctaataaagttaaagtcacgagaggaataattccgcaaccaattgcttgaaataaccttgatatagcaaataatataaagttatgtgtcactgcacaaataaagctagatatgattactattcccaatcccgttaaaagtacttttatagaatcacgagaatctatacttctaccaagtacaatttgcataactgcaacgataaatataaaaccgccaactgtcgcatttatccaaaatagtggtacttgaaaatcgtcatatagtctcggaataataggcgtgtatatgttttgaatcaatgatgcgaaaaatgctaaaaatcctagaatatataatctgatattacttttagtcatttaaaccatcttcttctttttttaattcttctatactacggtttaaaaactctacaataactgccatttcatcattatcaaagactttaagtacttcttcatatttttttaccgctttttcatgtaattcatcatgtatataagataatttttttccttcttgtgttaatgaataattaacttctcttttgttaaattcattgtgtgattcaactactaagcctttcgctaaaagtttttttatcgatttagtaattgctggttttgatacatttaacatttcagacaaaaatttattattcactttatcattattatcaatcaactctatgatatgaaattgtgttagagataaatccagttcctcattttcctttttatactgtcttcttttatcggcattttctctttctataataaattgttgtaactttaaaataacttctctcttcatatccactattgttcctcctcttcattagttaaccggttaactatattattgttgtcactcccatttttgtcaaatattgttgtaattaacatatatttacttagttatgcaccattaattccgcaaacgcatctcacaaatccttctataatacaaactatcattttaaataagcagaatttaccctgtcttccacacaaactattttcgtcactttaatatgccttctattcaaaaaagtcactcataataaattgcgcattttaataaatgtagcaatgccatttgcatgctgaaaaaatactcatattaatatttatattttatattatttaagttttttaaatacatatttttataacacttgctatatgataaaattaattttatatataaaatcttaagattcagattatttaatagtaaaggagatagtgatatggatgttttaacaatagaacatttaacaaagaagataggcaacaaaacgattctcgaagatgtatcatttaagctgaaacgcggacaaatagttggtcttgttggagcgaatggtgcaggtaaaacaactttaatgaaagttatattaggttactctagtttccaaagtgggaattttaatgttattaacagcaaggacagcaaaagcaatatcggtgcattgattgaaaatccaggaatatatccttttatgtctggatatgaaaacttgaagttattgaacgaatcaaaaaatactcaagatatcgataaaattgtctcacaacttcatatggatgaatacattcataaaaaagctaaaacgtattctcttggtatgaaacaaaaattaggaattgctatagcatttttaaataaacctcaattcattatcttagatgaaccaatgaatggcttagatccaaaagctgtgcgagatgtacgtgaattgattgtccaaaaagcgcaagaaggtgtcactttcttaatttcgagtcatattttaagtgaattagttaaaatcacaaattctatccttattattaacaaaggtaaaattgttacagaaacatcggaagaagaacttaaacaatttaaagaaaatgatttagaaaatgtattactagaaatcatagaaagggaggatcaagcataaaatgggaactttaattaaacaagaatgtttcaaattatttaaaaagaaatcaacttttatcgcacctattgtctttattctactaatggttgctcaaggttatatcgctacaaaatacaatgaaatttttacgccacaggaatctttcacatctgcttataatggtttttcatggtttgcatttttattaattattcaagcaagtacaatcatttcaatggaatttcattacggtacgattaaaaatttactctatcgtgaatattcaagaacaactatgattgttagcaaaatcatcacattatttattatttctttaatttattttgttattacaattattgcttcaattgttattgggtctttattctttaatgatttaaatatatttgaaagtagcggtaatcaattatctttattgaatcaattattattagttagtttaggtacatttgttggcgtttggttagttttaagcttaacgttgctattatcatctgcaactaattcaacgggtgtagccattgctgtaggtattgttttttattttgcaagttctattttagcagttattcaaacggcacttttagaaaaaatagactggctaaagtggaatcctattaatatgatgaatattatgcttcaaacagttgaaaaaggctttagtaagtcgacgaaattagaacttcatgaattgtttattggtaatattgcttatatttctattttcttaatacttgtagtatttattttcaagaagaaaaatatttagtaacttaaagtattagatgtctaaatacacacatattccatcgtaattcaaaatcattttcaaatcccttcacccaaataatggtgcggggatttttttcatccaaattttggcaattccacattttacatatcgtaattttttaggaaactagtgaatataacaaatccctcctctcatttttaaaatagatatatcacttctccacttttacttaactaaactgcaacggctcctaataccaaaattctgccctctatttttatcaattcaagcatacttattgaaaaatgttaacgttttcttgataatcattgtaagcgtattaattttacaaaccaatgattgaaatatactacaggagtgacacacaatgactcaaattactgaaagagaattaaaaaagaaatatttggatttattatctcaacatttcgatactccagaaaagcttgcgactgaaattattaatttagaatctattttagaattacctaaaggtacggagcatttcgttagcgatttacatggtgaatatgaagctttccaacacgtattacgcaacggttctgggaacgtgcgagcgaaaattaatgatattttcaaagacaagttatcaacgaaagaacttaacgatttgactgcccttgtttactatccagaagacaaattgcaacttattaaatgtgattttcaaaattatggacaattaaatgtttggtatattacgacgattgaacacctcattcagctaattaaatattgttcttcaaaatatacgcgttcaaaacttcgacgtgccttgccggagcaatacgttttcatcgtagaagagttattatataagaacaacgaattcaaaaataaaaaatcttactacgaaacacttgtaaatcaagtgattgagcttaagcaggcggatgatttaattatagggcttgcgtattctgtacaacgcttagtcgtcgatcatttacacgttgttggtgatatttatgatcgtggcccgcaaccagataaaatcatggacacgctgattaattatcattctctggatattcaatggggtaatcatgatgtgctatgggttggtgcttatgcagggtctaaagtatgtttagctaatttactacgtatttgtgcacgttatgacaatctagatatcgttgaagatgcttacggtattaatttaagacctttgctaacattagccgaaaaatactatgatgcagataaccctgcttttaaacctaaaaaaagacctgacaaacatgaacgtttaacacaacgcgaagaaagtcagattactaaaattcatcaagctattgcgatgattcaattcaaactggaaataccggttattaagcgccgtccaaactttgaaatggacgaacgacttgtacttgaaaaagttaattatgatactaatgaaataacagtatacggaaaaacatatccattaaaagatacatgcttccaaactgttaaccgtgataacccagcagaattactacctgaagaagaagaagtcatgaataaactattattgtcattccaacaatctgaaaaattacgtcgtcatatgtctttcttgatgcgtaaaggctcactttacttaccttgtaatggcaatttactcattcatggttgtattccagttgatgaaaatggtgagatggaatcattcgaaattgatggtcagacatacagtggccaagagttattagatgtgtttgaatatcatgtccgtaaatcatttgatgaaaaagaaaatactgatgacttatccactgatttagtttggtatttatggactgggaaatactcttcactatttggtaaacgtgcgatgactacgtttgaacgatactttattgcagataaagcttctcataaagaagaaaagaatccgtactatcatcttcgtgaagatgtgaatatggtgcgtaaaatgctcagtgatttcggattaaatccagatgaaggacgcattattaatggtcacacaccagtgaaagaaattaatggggaagatcctatcaaggctgatggaaagatgcttgtcattgatggtggcttttcaaaagcttatcagtcaacaactggcattgcaggctatacattgttgtataattcattcggaatgcaactcgttgcacatcaacaatttaacgcaaaagaaaaaattctttccgaaggtatcgacgaactgtcaattaaacgtattgttgataaagaattacaacgtaaaaaaatccgcaatacaaataaaggtaaagagcttcaggctcaaatagatattttgaaaatgttaatgcatgatcgttacttagactaaagacgacatttgatgcatgtatcgtgcacttatatagtggtgcagtgtttacgcattggctacgcaaacgcgatggtaaataggcgacctagctacaccgaaaaaaatcccctcactattgcgagtagtgaggggattggtgtatctatgctagttccttgttacctgtattataacaacttcacagcaaaaaaatgcaaaattaactaataaattaataaaatgaccgacgcccttgcttctactccaatttaacaaaatactatattagtactatatttttcattaacatgtatgttacattttctatattacttaaaattacgaagggacatttttaaatcatgcgcatcttaaaagagtccattattgtggcatttgcctttgttggtgttgtcgttggtgccggctttgctactggtcaagaaattttccagtttttcacaagtcatggcgcgtatagcatttcaggcattattgtgacaggactattgattactttaggtggaatgattgtcatgcatacaggtcatcatctaaagtctagaaatcattctgattcaattaactatttcttatacccctctattgcaagaggttttgatattattttgacaatgtttatgttgtctttagctattattatgactgcaggtggcgcgtcaaccattcatcaaagtttcaacttaccgtattggctgagcgcactcatattagtcgcctttattttagcaacactgtttctaaaattcgatcgtttaattgctgtgcttggtggagttaccccatttttaattgcgattgtcattatgattgcggtctactatttcacaacgagtcatcttgattttactgccgctaataatgatgctcagattcataagcagaaatcattatcacctggatggtggtttgatgcgattaactatgcaagcttgcaaattgctgctgccttcagcttcttatcagtgatgggtagtaaagttaagtatcgtgactcaacgttatacgggggcttgattggcggtttaatcattacatttttactaatgatgattaacctaggtttaatttctcaattcgataaaattaaacacgtcgatttacctacattaaaattagcgacacaaatgtctccgtcaattggtattattatgtctgtcattatgatacttgtcatctacaatactgttgttggattaatgtatgcatttgcgtcacgtttcagcgttccatttagcagacgttacttcatcattattattacaatggctgtcatcacttatattagtacatttatcggtttcatttcattaattggaaaagtattccctattatgggattgttcggtttcattttactcatacctgtactctataaaggtttaattaagcgtattaccggcaaatctcatatcgattaaaatatctatactattgtaaaatttagaacaacacttcaaaatcaaaaaagcgggcagatgaaaagtaaaaatcttttccatctgtccgcttcttaatagaactgttatttctcaagtatttgttgaccagccgttaatccagtttctgtaatttcatgaccattcacccaaacttcttcgacttgtgccccacgtgtcttaaacaagttaatgacttgttcacttgcagctaatggcacaattggatcatgtttccccatagaaagcaacacactgacatctgataaattctttgttgacgttatttcaattggatataacggtgcatataacaatgcttttttaaatggtgcttctgaacgcaacattaagttaatcgctatatttgatccatttgaaaatccaacaagtacagccttttcaatatcaaaatcataacgttcagcagcttctttaatgaacgttaacaattcttgtccacgaaatgccaaatcttcttcatcataaacaccttctccaagacgtttgaaataacggttcattccattttctgaaacttgtcctctaatacttaacaagtgataattttcattcaatgcttcacctaatggtaataaatcgaactcatcaccacctgtaccatgcaataatattagcgtcggcgcacctttttgtccttctctaaatatatgttccatcacaaatccctctcattccaattaatcatgttgacgtttcgtattaaaaggtctaacttccgattctatatattctcttttattttctaaaaatggtggtaaggataacccttcgcctaatgtttcataaggttcatcttccataaatcctggtccatctgttgaaatttctattaaaatatgccccacacgtgcatataatgcttcaaaatagaaacgattaacgatgcctgagttgttaatacctacctctttatatttcgttgcccacgcttctattgcagcatgatctttcacacgaaatgacacatgatgtacctcaccataaccttgacgtgctgctggccctttatcatcttttattaagattacctggccaccattgcctccttcgccaacttcaagtaatgcgacattatcttcatgcgcaatagttgtcataccgtaaacagtctctaaaatatttttaaagtcatcaaaataacttactttaatttcaatgggtcctaatccataaatcgctttatctactggcaccggtccattcttccaaggtacaccaggtgctaccccttcatttaactcatctgaaattaattgatacacttggccatcgacttcttcaaatggcaacacttttttaccaaataattcttgaataccttcgtgtttaacaccaaattcatcaaagcgctgttcataatatattaatgcgtcatcgttaggcactctaaaagacggtcttgtaatggaatttgttcctgcctgcccttttgtaatatttggaaaatcaaagaacgtcatgtctgtacctgccgaacctacgtcatctgcaaaaaatgtatgatacgtataaatatcatcttgattgactgtctttttaactaaacgcattcctaatacttctgtaaaaaatttataattacgttctgcatcatctgtcattgctgtgacatggtgaatacctagtaattcatgattatttgtcattttatataccctctttatatttttagtgtacttatctcgaaaccgagatattttaatgtaaatttttagtgcacgccttacacttctgtagattgtgcacttagtttcttaaacgcttgttgtaagattgttaattcatcctttgttaacacatcaaacgcttttgttaatgtctcagcatgcttagggaaaatatctgccatttgactttgacctttttcagttaaacaagccatatatacacgtttatcatctttatccttttcacgtgtaatccaacctttgtcctctaattgacttacaacatatgaaatgctgctacttgcaattaatacgcggtctctaatacgttgaattggttgcggacctttattataaagcaactctagcactgcaaattcagtaatatttaagccatatcgctttacgtcttcttttgtaatttgctctaatgtgtctaacgccctattcattccgacaaagacattgagcgattgtttcgttcgatccatatcatcaccaactttttaatttatttcgatttcgagataaattatatagctgaatgaatttaatgtcaagatacgtgttttcatcttcatttcaaactgcgcttaataaaaataactacttgtacagcggcaatgtcgtcacatgactgtcatgcacctttgtcttcgtttaagttaaaatagaatagggaaatactataatcaatcatgataggagttgatatgtatgagtaaccttgaaattaaacaaggcgagaacaaattctatattggtgatgatgaaaatcatgctttagctgaaatcacataccgttttgtagataataatgaaattaatattgatcatacaggcgtatctgatgaactcggtggtcaaggtgttggcaaaaaactagttaaagcagttgttgaacatgctcgcgaaaatcatttaaaaattattgcctcatgttcatttgccaaacatatgttagaaaaagaagattcatatcaagatgtgtatcttggttaaataaacctcgcgatggtgctccagtaccatcgcttttttatttgttcgtatcaatataaaattgcgaaacatcatgttattttgcatttcaaactttttgctgtcaattcattttcttttctggtatactttttatactaacttatagaaaaatagaaaacgaggcgatgcataatggcatttcacgataaaacagcaacacaagtgacaaacattgaactgaacgtaagagacttagacttaatgacaacattttacaaaaacattttaggactacccgttaaaagttctgacgataacacaaccgtattatctgttgggactggtggccatactctaacgttacatttattagaagacggccgtcagacttccccacgtgaagcagggctttttcatatagcatttttattaccaactactgaggatcttgctaacttcttatatttcgtggcacaaaaaaatatgggaatcggcgctggtgatcatttagtaagtgaagctttatatttcaacgaccccgaaggtaatggtattgaagtctatcgcgatagaccttcatcttcatgggaatggcaaaatggcaaagttaaaatggatactttagaagttgatagccaaaccttattaacacatcgtactgatgaaggttggcaaggaatgccagcaaaaggcatgattggacacttacatttaaaaacacatgacttagacgcagcatatcaatgttacattgaacaattaggattccagcatgtatctgattttccacgtgcgctatttatgtcaacgaatcattatcaccatcatattgctgctaatacttggcaatccaatcaagcaagacaaaacaatgcacaaagttatggattaacacatgttgatatttatcaacccgacgcctcaacacatacatttacggcaccagaagggtttgacatcacagttcattcaaatactgaccttgttccagaaaaataatcatccatactttattaatacaattttttcacgcaaaagcctgcgattcatttatgtaatcgcaggcttttttattgctaactttttaattttatatatttagacatactgtattctatctattcttttggtccaacccattcaataacatcttcatatgcttggcgtgttttatttttcggtggatcttgttgtctgtagccaaatgcgaccatcactgataaaccaaattgctcagtatctaagatacctttatttgctaaaatgtctgtcactgtatccagactaaaaccttccatcggacatgaatcaatacctaacaatgcggctgtcgtcatcatattgcctaatgcgatatacgtttgtttacttgaccagtcatacaaggcttgatcattatcagaaatatggaaatctgcttggaatgcatcgaatttttgttcaacagctggaatcgtttgtgcctcatattttttaatatctcttaacatatgttgtacatacggtgatcttgacgttacatttttacgcgcaaaaattagcacaaaatggctcgctgtatctaattgcttcgctgcgccccaactgtgcgcttttaattcatcacgtaacgcttgatcttgaatcacgacaaacttccaaggttctaacccaagagaacttggagacaatctacctgactctaatattgtttcaaaatcttctttcgaaactttcttttgtggatcgaattgcttagtcgcatgtctgaaatgaaatgcatccataattgtttgattcatattgctcattgaacatagcctccaatttttatatttattgctatacaaattatacttcatgttttaaaaagactaaagtaatccgtttgcaattcactataacttgtgcacatgttataagttttctgcaataaaacacacttttgaattttggaaaatttagtgttataatatatttgtgatatttttcacaattaaattgtggcgtgattttaatgtacataatctttaatttcactcatttacttttcaatcttttaaaagcgaggtttttaataatgacaaaaattatgttctttggtacgcgtgattatgagaaagagatggcattaaattgggggaaaaagaataatgtcgaagtaactacttctaaagagctattatcaagtgttacagtcgatcaattaaaagattacgatggcgtaactacaatgcaatttggtaagttagaaaatgacgtttatcctaaattagaatcttacggtattaaacaaattgcacaacgtactgctggatttgatatgtatgatttagatttagctaaaaaacacaatattgtgatatctaacgttcctagttattcacctgaaacaattgcagagtattctgtttctatcgccctacaattagtgcgtcgcttcccagatattgaacgccgtgtacaagcacatgattttacttggcaagcagaaatcatgtctaaaccagttaaaaatatgactgttgcaattatcggtacgggtcgtatcggtgctgctacagctaaaatatatgcaggatttggtgctacaattacagcttatgacgcttatcctaataaagatttagactttttaacatacaaagatagtgttaaagaagctattaaagatgctgatattatttctttacatgttccagcgaacaaagaaagctatcatttattcgataaagctatgtttgatcatgtgaaaaaaggtgcaatcttagttaacgcagcacgtggtgcagtcatcaatacacctgatttaatcgctgcagtgaacgatggtactttgttaggtgctgcgattgatacttatgaaaatgaagcagcatacttcacaaatgactggactaataaagacattgacgataaaacattattagagttaatcgaacatgaaagaattttagtaacaccacatattgctttcttctctgatgaagcagtacaaaaccttgttgaaggtggtttaaacgcagcattatctgtcattaacactggtacatgtgaaacacgtttaaattaatatatatttaaaagcaaaggcgcgccatgtgcctttgctttttttttgtatatctgtatcaaaatcgatttgattaaaatccgctttattttatcatctattcaaatgattgtagtgcgcttattttactatggcattattgcctaacctgtttgagatatattaatatttgatgattcgtattcaaagttttcatttaacatgtatttagtatcatgatagctgcttcattgatgatatactacctactttttcaacacttcttgttcgataatcgttaaaacaccctgcttatcattacttggagcgacagcagaggcaatattgaacaattcttcatcatgactattttccatcacataactatgcttagcgaacgctagcatatctttatcattattcgcatctccgaaggccatgagctctgaaggagacatttcccatttatctaacaatcgttttaatgcctgtcctttagtcatgtttggcataataatatctatactatcgtgcccacttgagacaagtttaatatcattgctgaattgcgtcgctacttcttcgtctacatttggatgcgtctcacgattaatattgaatgctattttgacataatcatcctcaggtaattgttgtagactgtcaatttcttttaactgatgataataaaatctcgtatcttctttaaacgcttcagaagtatgttttaaaatatacgcgcttttcaaaccacagatgacgagttgatcaatactttggttcatatttaagaaatcgacaacctgttgaaacacctgacgattaaagcttttataattatataactcattgcctttataaataactgcaccattttcagaaataaaatacatatctctatccccgaaaatagacttcaacttcgcatattgattgccactcgcagcaataaatgtaatatctctatttctaagttcagtaaaaatcgcttcaaatcttgatttatcgtatgtctttttcgaatctaaaaacgtcccgtccatatctaccgcaatagccttaaccatgattatcctcctcattgctcttttagtcgtcttcattatatccatctcatgacaagcaatgaagtttgtcataccacaatgaacctatattcacattttgaaattgctttcatatatgcaaaacacattacactggatattaaattacttttcacctcacaccaaacaaaaaacagtctcgcaaacaagactgttttccactcaatatattcatccattagcgtaatggattatttaacttcagtagctacaaagattttacgtgtttcccaaacgcctgtcttttcattgtaatcatcacaagtaattaatgttaattgtttatctttacctttttgttcatctagaacttccacatctgttggcttaacatctcttatacttgtcattttatacttacgtgtttcattaccaactttaaagtacaccatactaccttttttggctgctttaagatttgtaaattgatagttcggacggtcaatgaaagtgtgtcctgcaattgaaatattttgatcatctagtgattcattttcttctgcaaagcttacacctctatttaattgttcaggtgttgctggtcctggatatactggttctttaatatcagcatctggaatttcaatatagcctgccacttttgatttatctttcggaatctgaggtttagcttgctgcttattgtctttactcgcctgttcttttacatttttatcatattgttcaatcttttcatctttatctttatcgtgaagataattatcgatatgtggtttagcaaacaaatatgctgccactaggataagtactacaccagcgattgtcattaatcgatttgtccattttttcatacgttaaggctccttttatacatttcacaatgcctattaacatttcatatagtataccattaattataaaatgactcatagcaattcattttataatattaaatttgcacatatattgtcacgttagatttcattacacatatttgcattcaaataacgaaacgtttttaatacatattaagggggaattattatgattcgatgtgctaaaaaagaagatttaaacgctatattagcgatatacaacgatgccattattaatacaacagctgtttatacttatgaaccgcaaaccatagacgaacgtatcgcatggtttgaaacgaaacaacgtaatcatgagcctatctttgtatttgaggaaaatggaagtgtattagggtttgcgacgttcggttcgtttagaccttggccagcatatcaatatactatcgagcattctatttatgtcgatgcttcagctagaggaaaaggtattgctagtcaattattacaacatttaattgtagaggcaaaagctaaaggttatcgtacacttgttgctggtattgatgcttctaatgaagcgagtattaaattacatcaaaaattcaatttcaagcatgccggcacactgaccaatgtgggctataaatttgattactggttagatttagctttttatgaattagatttaaaagactagtaaggtttgaatcacataatataaataagacaaccatgttaattcacttaacatgacaacatataaaattataaacttctcagggacaatttacatcgtcccttttattttttcatttcaaatactatccccatagctttgacttaacgctttttctcaataacaaaacgaatatagtaaaacatgaaaacgataatcatgctgagtgataaagatttaaataatagattgacccacgttccctcagtcgtatatccatatgtaatcgttgtgttaatgatgaatgctataaagatgattgatagtcttagcatatcatcactccttttaagttattttagatatacgggggcgcttttgcaatcactattttgattagaatgaatttaccataaatttttcaacttcatcatagataattaagaagcatctatctggtactaataatccagacagatgcttcttttttatcaatatcttattgttatctcattaattatttttaaccatatcttcagctgtgccaaagattttacgtttaattgcttcgccagttggtgtgcctgctagcccacccaatccagtttcacgtaatgatgcaggaaggttacgaccaaccttatccattgcttcaataacttcatcaacagggattctactttcaatacctgctaatgctaaatctgctgaaattaaagcgttacccgaaccaattgcatttctcataacacaaggaatttcaacaagtccggctactgggtcacaaactaaacctaataaattacttatcgctaatgccatagcgtgcccggatgcttctggtgatcctccgaaaatagctactgctgcagctgccgccattgcagatgctgaaccaacttcagcttggcagccacctgttgcaccagctacacttgcattgtttgctacgacacgcccaaacaatgctgaagtgaataagaaatcaatcatttgctcttctgttaaatcatgtgttttttctaatttaaaaagtgcaccgggaatggtacccgaggaaccagctgttggcgttgcacaaataatacccatcgcagcattgacttcatttgttgcaatggcacctttgactgcatcaatcatttcatatccagacaaagcatgatgtgtttcattataatcacgtagtttagcagcgtcatgaccagtgtagcccgttacactttcaacgccatcacctgtcgtccctttgattactgcatctcgcatgacatctaaattttgtttcatttgcgctcgcacttcatcacgtgatttaccgcttaattccatttcttctttaaccatgatatccgcaaatgacatattattttctacggcataatctatagtctctctaattgaatcaaacatgtttattccccctctaatttatataggaaacgtttacgtcactgtatttctctttaattgtatttaatgtcgattctgagattgctttatttaatggtattacaaccaagcatttatcttcatctatcttaataaattcatctttacagtctaatttcatatcgttgatatcattaatgaaatgatttacttgtgctttagtcatatttccgtcaacaactaaaattggtaatccatgatttaaatctacttctagtccatttatatgaatacctttaattttaattgtaccaccaccgattgaaataccgataatttcaatgtagcgaccatcattacgagatgatttaatataagcacagtttggatgttgaccaatactatcgccttcttcttcgatgatatctattttaataccatcatcagctgcaatttctaatgaagatttaattcggttatcaaatgttgaatatcccattgctccacccacaatagcgacatctgtaccatgtccttggtgtgtttgagcaaatgattcataataatgtatttcaatatttttaggaatatctcccaatattgcgcgtgctgaattcccaatctttactgcaccagccgtatgagaacttgaaggtcccatcataactggtccgataatatcgaaagcactttgataatcatagctctttgccataattaaacactctccttaatatgattctttttgctcggcattttaaagttgatattcattaaattaaacttattaattagtgttccaataatataggctaagacaatgctgacaataatcactgttgctattgttacaattgatgtcactgcattattaaagccaaacaatacgatggcacctgcaattggtgttgccatacctttaacacctattactagtccgctaaatgtcacgatacatgcgttgacgaccccaatcagtgcatttgtaccatatagttgtactggatattgcgctattaaatcaatttgcgtcaatggctcaatacaaactgcaaatgcttttgacggtccaccaatgtttaattttcggaataaaataaggttaacaaatgagctacctgtacatgttagtgctccaatagccataggaacacctgtcagtcctaataaacttgttaataccattgaacttagcggtgtcatacctgtaacaggaatcactagtcctaaaatgaccgctaatgcatatggattgttatcacctaccgcagtgacagcactacctatttgttttagtgttgctagcacaccaggtgtaatgattgatgcaagtccgaaagcaattgctggtgcaaataaaatcaccacaattaagtccaagccttctggaactttcttttcaatccatttaattaaaaaagctacgccataagctgcgatgaatgctggtaataatttaaagtcatgtaatactaaaccaacaatgaccgcaaatactggtgcaacgcctaagtttaagcacgttagaatacctactgcgataccgcttaaacttcctgctaaatccccaatatcttgtagaaatttaatatcaaatacgccaccaatagcgtaacttaagaatgcttgtggtaaaaatgtcgcacaagctgcaccggataatgcttgtagtccttgtttaccgtacggtgcatactttaaaaatagcgtcatgatcactaaaaccaagactaatgtgcctacacctaacagaatatccatttcccaaaaacctctctctatgtttattttattttcagaccataaacatcgtacacccttaagaaaacgttttcaacttttatctgttatcaaatcaaatatttaagtgaaatatttcatatttgtgaaagatttttaaaatggattgtttcaaaaactacttatgttgtcattaatatttactaattaactttttactctgtatttcaaacagttgtgtgacagttttttgataacttttttacatccgaaaataagtaatatttctaaaaacttttaatatttatacattttatctttcgagctatttatttttgtttttgtgctgtgttgataaaaccgcacactatattcaaaaataacttattacacatatatttgcaataagataattaaagtaggatattatttttagttttctgataggaatgatgatagtctataggttgaatctttactttttttaaagctaaatttacatcaacttaacaatgtctggttatactgaagatgaaaatatttagtataacttagtggaggcggtaaagatgcaattgagtcattccgttaaagttgcaatctctatctatttagcacttatctttataacgttcacttcttatttagtcattattttatatacgagtatgactggacatgatgtatcacatttcgtgttagatagtcagcattctcatcatggatctcttacgcaaaaacatttgagtcttcctgaaatctcatttaaatagtttatcctctatgtttcaacattcatttcccatatcgattcatttatctatcatctagaccactacatcttagatgatttttttattttttcatttcactctttcttaaaagtcgatataatgaattaaatcattatcatacaccgacatattttatgttgttggtgttaagttttaaaggggtgagatacttggcgaataatcattcagctttgcgtttaaaaggaattatacttgccattgtcggtgcttgtttatggggattaggtggtactgtttctgatttcttgttcaaatataagaatattaatgtcgattggtacgtcactgctcgacttgtagtcagtggtattttcttacttattatgtacaaaatgatgcaaccaaaacgttctatatttagcgtattccaagatcgacgtatgttaggcaaattacttatcttcagtatactgggcatgttagttgtacaatatgcttatatggcatctattaatacaggtaatgctgcgattgcaacattactacaatacattgcgccagtttatattattatttggtttgtcataagaggcgttgcaaaactaacattatttgatgtgcttgctattatcatgacactattaggaacatttttattattaacgaatggttcattttctaatttagtcgtcaatcctgaaagtttattctggggtattttagccggtgtagcactcgctttttacacaatttatccttcagacctacttaaccgcttcggttcgattctaattgtcgggtgggcaatgcttatttctggtgttgcgatgaatttacgccatccaatttggcacattgatatcactaaatgggacatatcaattatattatttttaatctttggtattatcggtggtaccgcactcgcattttatttctttatcgacagtttacaatacatatcagcgaaagaaacaactttattcggaactgttgaacctgtcgtagccgttatcgcaagcagtctatggttacatgtggcattcaaaccatttcaaatcgtaggcatcattcttattatgattttaattttattactgtcacttaaaagacaacctgaaacattagatgaataagaaaactctgataatcactttagcaagtaactattatttaacaatgtagctaccttgtaggtgatatcagagttttttattttagttaataatatttttcacttggtataaaaagcgtcggcgctctggtatcggaaatactggataaatatggaattggtaatatccaggtataaagtcatgttcgatacctttcgcactcaacaattgcgataagttcaaagcatctgggtacagtacttcttttgtgccaacagttaatgtaatacgacctaaaccatctaagtcaccattaattggtgatactttgtagttatctaaaggtgtgtcccctgcccattgttcagctaagaacacactgccatccacacctaccattgggtctttctttaagtaggcaggaatttcaggatgctgcatcgttgcatctaaaactggtgaaattaatacaatatgtcctggttgcacaatatgtttttcttttaacaattgagcaaatgataaagcaatttgaccgcccgcagagtcacccattacaacgatttgtttagaatctgctacttgattcaataaatcatggtataacttttcaaaaagcacatacgtcgcttgataatcttgatgcggaatcttaggataaactggcatgatgactttagcattgagtgtttctgcaagttcatcaataaattcgaaatgaattttgagtgggtcttggaaccatgcgcctccatgtgcgtataatacaacgcgttgatgcttatcttgtttatcgttaacggtataaacggttgaaccgaagtgcttatccacttttactggcatcttaaactgataattggtgccctcatattcacctgctgtctgtggcgccattttttctaatgctttcatcgcttcttctttatacataaaacgacgcttagctctagataatcgtataccttgttctaacatataacttttcacactgcgtttttctttaattctaatatgtgcgtatgccgctactaaaaatccaaacgcaagtgtagaccattttttacgcatttgtcgtcactcctctttgatgatttctactatagttctactgtaccatgctgattcttattactaccaatatttactgggaaataagttatgatgtctacataatcttagcaatgctaatcatttgcgctattaatgctcatcgacatcgttattcacactatcattcatttgcttaagatgatgttcaaaacgttgcatatcgataaaacgcccttgtcgatgcatttcttttccattcataaaaattaaatccacaggtacagtgaaaatatttaattctccagcaatagcttccacctgactttgattaatcacagctaatggcacattggggtatgattgcatcaagtcttcaatttgtggtaaaactgcatgacacacgctacactgatcgcgcatgacatgtacaactgctaacggatattgatgaataaattcacggaatgctacgacactatttaattgcttaaccatttcgaacaccttcttactttttatattttaaatgcgatcattattttgttgctaaaatgtcttgaaatacttgtggcacagaggtaatcttcttatcgctcaatctgtaaaaaccgcctgtctgtgtaccaatacaatgcacgccatgtgcggacacaatttcaaactgaaacacccatttcatcttgcttgctttaactaagtaaatacgacctactggtttgtcatgtattgtgacaggtactttatactctgcttctgttttcataagtataggtgaaatgccttgattgatcattgttgagtaattcatgtgctgattaataaacgctgttctcaaatcttcgaaccatctaatataaacgatgttactaacgacacccatcgcatcaatgtcgtaaccattcacttcgatttctttctctgcaactaatagaccttctgttgtcataatgacaaatctccttatcttacaaatagatttaaaatcatgttaatttatttttattactttcatgataaaaatacaagcaattgaactttattacggaaaatcaaacttttcgatgacgctattaatttagctagtcgcgaagacgcatttttctaaaatgtgacaaaaacataagcaatgttttctatacctaacactaatattattctcatcaacacacctgctatacatcattgcgcactaaaaaggcagtagcttcattttaagctactgccttttgtaacatattctctttcaactcgctacttcgcatacgcactacgaatgactaaaagttcattcatttgatatgctgtttcatttttaatcattatttgaccgtcataattagcttacctggatcagcatcttgtacatcttcaatgacaagttttttattttcaagatttgtaataatcattggtgtaacgatgcttggtgcgtgcgctttcaagtatgctaaattcactttcattaatggttgaccttgtgttactttttcatcaacgttaatcagactttcgaatccttcgccattcagtttcactgtatcgataccaatatgaataagtacttcgacaccactttcagattctaatcctatcgcatgtttcgtagggaagattgttttcactgtaccatcaaacggtgctacaatttcacctttttcagggataaagccaacaccatcacccatcattttaccagcgaatacttgatcaggtacttctgataatggaatgatttgaccgacacctggtgcatagatgtctgttgttccaagtgcttctacgtgaactggttcatctgacatttcttcagtcactgtcgtttcacttggctttgtaatttcaccactcataatcttcgccatatcatgtttaatttgatctgattttggaccaaagatagcttgcatattgtttccaacttctaatacacctgatgcgcctaaagctttaatacctgctacatctacttttgatttatcaaccacttctacgcgcagacgtgtaatacatgcatctaaatgtttaatgttttcttttccacccattgcatctaagacatcaaatggtaattttgcgacactagagttacgaatttcagtttcttcatcttcacgacctggtgttttcaatttaaacttacgaattgcaaagtcgaataagaagtaatacacgatagcatatacaataccgactggaataactaataatgcgtgtgaacgatcccagtttaataaaccatataaaatataatctatgaaaccacctgagaatgtcataccaattttaacgcctaataaatgcattactaagaatgatgtaccagctaataatacgtgaattccataaagtactggtgctacaaataagaatgaaaattctaatggctcagtgataccagttaaaaatgcagttaatcctgctgataacattaaaccacccacgacttttttacgttctggtcgtgcatttttataaatagcaaatgccgccgctggtaaaccaaacatcatgaatggatatttaccagtagtaaatgcaccagcagtaaatggtacgccatctttcaattgtgccatccaaatacgttggtcaccacgaactaattcacctgcgtgatttgtataacttccgaattcaaaccagaacggtgaatagaaaatatgatgtaaaccaaatggaattaatgagcgttcaataataccgaatataaaagttgttaatgttaaatttttatttaataagaaattcgataaactatttaatccatcttgaattggtggccacgcaaaacttaaaaccacacctgttgcaattgctacgaccgatgtcacaatcggtacaaatcgtttacctgcaaagaatcctaaaaatggtggtagtgtaatattataaaatttgttgtaacaccatgcggctaaagcacccatgataataccaccaaacacacccgtttgtaatgttggaatacctaatactaaggcatgtgctggttctttcgctgcttgacttaattcttttgcccctttggcatatgagaaaatgtcatcaattgtaatatgcaacactttccccattgttgcattcataattaagtaacctactagcgctgctaatgctgcaacaccgtctcctcctgctaatccaagtgctgtaccaactgcaaataataatggcaagttatcaaatacaacttgtcctgctgcttccatgaccgacgaaatcattacaatgatatcgttttttaaccatggtgcaatttctactaattgttcgttgtgcattgcgttaccaaacgctaataaaataccagctgctggtaaaatcgcaacaggtaacattaatgctttaccgatacgttgcaattgtccaaacaatttcttaaacatataaacatcccctatctcaatttccgcttccatgtacaaaaaagcaggcatgaacaaacaagactattctcatagtacggttgtttgctcatgcctgcattaccagtaacacgcaagtgatatgtaattcatagctattatacatatttgtaaaagcgttttcaacaactttttcacaattttatcatcaattcagtacaatcatttgtgataaataaacaaaacggcaattcccattttgttgaaatagaaattaccgtttttatagttcaattcaattgtgataacctttcaatcagttataagaaacgttttgctgcaactgaaataggtggaatttgatctaaatctaaatgtttatcttcagtaatagatctaaatgcccatttaccataaccaagcgcttcttcatttacaattttacctggtaatggcgcagcattaggatcaacataaacatctacaattgttggtacatcttgtgctagtgcctcttctacaatagcatctacttcgctagcacttttaattgtataacctttaccacctgctgcttcagcaaatttggcatgatccatatcagagaaatcaaccgcatattctaattcaccagcagcttgttgttcatatttaataaacgctaattgcttattatttagaacaaacactgttaaaggtaaatcatattgtacagctgttgcaaagtcctgcatcaccatttggaatgcaccatcaccagcaattgcgatggcttgtctatttggatatgcaatttttgatgccattgcacctggaagaccgcaacccattgtacctaaccaacttgaaatgatgaacttgttatttacaccaaggtttaagtatcgagttgaccaaactgttgctgtacctacatctgctgaaatcactgcatcatctttaataaatttattgattgatgccattaatcgttctggacgtaatggtttactattattatttttatcttgttccatccatttatcccaaaccgctttacgttctaacgttttgtttaagaatggtctttcagcaacatgtttaatattttcagttaactgatgcaacgcaattttactatctccaacaattcctacattaatattgaaacgatgtccgatatttttaggatttgtgtcaatttgaatggctttaatatttttcttaggtaagtaatccacatatggatagtttgtaccaaccataattaataaatccgcttcctgcattgtttgataagatgttttagtaccgattttacctaagttaccgatactatatggatgatcatccggcaagattgttttagctggtaatgaatgaatgacaggaattttagtcatttcaataaattcacgtagctcatctttcgcatgtttcgcaccaacaccgattaacatgacaggctttttacttttattaattaatttaaccgcttttttgatgtctttatattttggtgatacaactgttggtcttgatgtatctactggtttattcgttgtatctttaattttttcagttaataagtcgttaggacaaataacaacagcgacacctttttgttcatatgccgtacgaattgcttcgttaacgatttcaaacacattgtcacctttttcaatttggtgattataaacggctacatcttcacataatttttgtaaatttgtttcttggaatgctttcgttccaagtgctgtactattcgtttgtccagataatattaattgcggtacattatccattttggcatcgtacataccatttaataaatgaattaaaccagggccaccgatacttaatgccacaccgattttaccagttaattttgtataaccagcagccgctaagcttgctacttcttcatgacgtacatgataaaatttaaattgatctctcactgtacgtaaactatcgacaactgcgtcgattgagtctcctggaataccatacaagtgatctatatcccatgcttgtaatgctttaactaatgcttcatttgcttttatttttgccattattactaatagcctccctttcttagtgtctttttctaattaatagaacagtatgattagaacaggtattaacaccgaactaataactgcagttaaaatcatcccaattgaactaaatgcaccagattcaatatccatctccagtgctttagctgtgccaaatgcatgtgacgcattcccatacgttaaacctttggcgatagaagattcaaattttccaaatcgtaataacatcgaacctaaaatactaccgattaaacccgttgtgataataaaaagtacggtcatcgtatctgtgccaccaagttcatgtgacacttctataccaacagcggctgttatagatcggggcaataatgttacaatgacgtctttagaatagccaaatgctttaagtgttaagaacactaacatgaaatttagcatgacgccagttaatacacttgcaaaaatgatagagacattatctttaattttctctctatttttataaagtgggtacgctaaacatacgacggttgcgtttaaaatatggttgatccaactgccacctttcatatacccgttataactaattccaaagataagtaagacaaaaataattcctaaagatgcaattaatgctggattcaaaaatggatttggatatttttgttgtaaccttttagcgaaataatataaaacgacagtcaacaaaatcattaacaaggcttgcacgtaatcattcataagcatctatacctttacgttgcttatgtttgacagacattttttcagcaatataacctgaagataatgcaacgatacatgttcctatgataatgactgcgaaaaagagtatataatttagcgtaatttcggaagcaacatccataatacctacaactgacggtatgaagaaaaagaccatcgtctttaataaaaagtttgcaccgtcttctacccaagttagcggtacaatcttaaattgtaatagtaaataaaataaaaatagaccaacaatactgccggctaagggaagatgaaaaatcttttgaatttctgtgccaatataagtaatcacaatgatgattcctagttgtagtaataatttgattattaattggactttgtgcatggcgccatccctttctaaatatgtctaaattgttacaataactattataaagatggcgtacacaatataaaaatactctttttttatagtttgtattactattttctatggaaacgctctctaaatttcacttcattttcacaaaaaaacactcattatttcaatggcccacgtaatgatgcgccttaaataatgagtgctttattaatatgttagcctaaacgatctttcaaaaattctatccatttcgttgtggcatgacttaattgtttatccttcttccaaacaacacctaattcccaatgtacatgcgcatcttcaatgcgtagtagcttcacatctccatttagttgctctgaaattgatgttggtaaaatactaatacctaattcattcgtaactaaatcttctataacatgccattgtgaaatttgcgctacagtattcggaacaaagccaacgtttttagcattttcaataattttatcattcaagtaaaagtctttattaaataaaatgaagtcttcacctgctaaatcttcgagtttaacagtttcatattttgcgagtcgatgctctctgctcacgataagtcgcaaatcttccttatctagggtagtataatcgaaaatatgatgatccactggcaaagtggtcacgcctatatctacttcatcattgataatttgctgctcaatcgtttttccgccattttctattaaattatatgtaacatttggatattgttgatggaatgcaccaagaatattgataagaatcttcatattcatgactgccgacatgcccatatttatatgccctgtttccaatccattcaagcgttccatttcagatggtaaataatcatacagtgcaacaatttctttacttttctcataaaaaatttgacctgcatcggtaagtattaaatgtcttttacttctatcaaataagggcgtgcccatttcattttcaatatctttaattgctttactaattgtaggttgtgcaatatataatgatttggaagcattagtcatgcctccttgcttaacgacttcaataaaatatttcatatgtttgatatccactaacatcatcctaactatttcaacacgtttatttcattatacacaacttcttaaacattcaataaatttagatttataaaattgctttataaaaagttttatgtaaaatacacattcttttatggtattatattaatggctcaagtttgttattcgaggtgaggtattgagcttttacgaatttatgcaaagttttcttggtgatgacacaccattaggtgaattggttgattggattaatcaagatagcaatttccctagagaagtgaagagccatagtgaaatattgtcatattttcgaacaaatccatgtcctgaaagcatctcagtacctgtaattaaacgggcactatcagttttcaaccaattcacaaatgtacaatgatacatgaatacatggagtcacatcatctcatgttagcgctctgattgcagggcgctgtttttaatgttatcgcttcatttatatgttgtgattgctattttcttttagttatagaaccacgtaccttttcttttaaatcattttatattttcccactaatatccgctgttaatcaatcctgacatccttgtatcactatgacacttaattgttagatacatgaatttctgcattttatgaaaaaatccatttttattacaatttaacactttatatgacagcttcattacagttacttttattgttgattgcttgcattgttttctaaaaaaattttgctatcataaataacgttgaataaagaaaaaattaacttgggagataaaaatgaaatataaaaagatactttttcgtttactaattgcttttgcagtccttttctcagcagatttcacttatcaatccgtcgaacaaacgcatcaatcgcatgccgcagttaattattatagtaaaaaccaatgtacatggtgggcatttaaacgtcgtgcacaagtcggtaaacctgtttctaatagatggggcaatgccaaaaattggtattacaatgcacgtaaatcaaaatatgcgactggtcgtacaccaagaaaatttgctgtcatgcaatcaactgcaggatattatggacatgtcgcagttgttgaacaagtatataaaaacggtagtattaaagtttcagaatacaacttttatcgcccattaaaatacaatacacgtgtactaagcaaaaaggcagcacgtaactttaactatatttactaatcaaaaaacttctatcacgaacgcttcaaattcctgtatgcgtgtgatagaagtttttattttttgttcatattaatttatctaagcgctacgatggactgacttaaacttttctttaaaaatcgctattcgcatttgattattgttggcttcttaaatcttgtaaaatgcgttcagctacttgtgtattcgcacgaggttcttgcttcaatgcttcagctacttgcgcaatttcatcaccttttgcacctacaacaatagctaaagatttatattgcaagctcatatggccttgctggataccttcggaaacgagcgcgcgacatgctgcaaagttttgcgctaaaccaacggcagcaactacatgacctaattcttgtgctgaatctacatttagcaattctaaagaagctttagcaattggtaatacttttgtaccaccgccaacgattgccaatgtcataggcacttctattgtaccaattaaacgttgacgttcttgatcgtatccccatgttgcaataccacgatattgtccatctctacttgcgtatgcatgcgcacttgcttctgcaccacgcgtatcatttcctgttgctaaaacaacggcatgtatgccattcataacacctttattatgtgttgcagcacgatgaatatcaacttgtgccaatacagaagcacgttccattcgtttggcaacctcttctccagttctctcgccccttgctaaatctttaacatcaatttcgccttgaactttaacaacggacgctgttgcatgattggataaaatactcattaaaatgtcgctttgcggaaattcattttttaaaaatgcagttatggcctctaaaatcgtattgagcatattagcgcccatagcatctttcgtatcaacaaatacttttaaagatagtaactgttgctcaggaaatgtatcaatagctatacgttggtaaccaccaccacgcgctttaatagaaggatatgcctcatccgcaattttatgaatttgcttttctaaagctttaatgtctgctgataatttttcagtatcgtcaacgccatcaaagacgatttgacctatcataatacgttcagaagataccgttttaaatccgccagtctgattcactagctttgcaccataactagctgcagcgacaactgaaggctcttccaccatcataggtacaacatatgccttatcgtccacaatgatatttggtaataatccaacgggtaatgcaccttgcgcgatgacattttcaattaaactatttgctacttcctcatcaattaatggatgattcaataaaatgttgaattgctcttctgataaccattgcttatctaccaattgttgtaacttttgttgacgagataaatgtcggaaattcttatctaaactttgcatggacatactccttttacttcacataattttttaacatttcaatcactactatttttaccataaaataacgttattcgtcttaaaattcaattgaataattattgttttaactataaaataaagcaaggtaaattaaaacgcttacaagaaacgtcaaatcatttttaaatttagtgtatttctttgtataagattagcatattctgatatgatacaagtgttgcttttataaatttgaaaggatgtaaaaccttatgacaataggtatcgacaaaataaacttttacgttccaaagtactatgtagacatggctaaattagcagaagcacgccaagtagacccaaacaaatttttaattggaataggtcaaactgaaatggctgttagtcctgtaaatcaagacatcgtttcaatgggcgctaacgctgctaaggacattataacagacgaagataaaaagaaaattggtatggtaattgtggcaactgaatcagcagttgatgctgctaaagcagccgctgtgcaaattcacaacttattaggtattcaaccttttgcacgttgctttgaaatgaaagaagcttgttatgctgcaacaccagcaattcaattagctaaagattatttagcaactagaccgaatgaaaaagtattagttattgctacagatacagcacgttatggattgaattcaggcggcgagccaacacaaggtgctggcgcagttgcgatggttattgcacataatccaagcattttggcattaaatgaagatgctgttgcttacactgaagacgtttatgatttctggcgtccaactggacataaatatccattagttgatggtgcattatctaaagatgcttatatccgctcattccaacaaagctggaatgaatacgcaaaacgtcaaggtaagtcgctagctgacttcgcatcactttgcttccatgttccatttacaaaaatgggtaaaaaggcattagagtcaatcattgataacgctgatgaaacaactcaagagcgtttacgttcaggatatgaagatgctgtagattataaccgttatgtcggtaatatttatactggatcattatatttaagcctaatatcattacttgaaaatcgtgatttacaagctggtgaaacaatcggtttattcagttatggttcaggttcagttggtgaattttatagtgcgacattagttgaaggctacaaagatcatttagatcaggctgcgcacaaagcattattaaataaccgtactgaagtatctgttgatgcatatgaaacattcttcaaacgttttgatgacgttgactttgacgaagaacaagatgctgttcatgaagatcgtcatattttctacttatcaaatattgaaaataacgttcgcgaatatcacagaccagagtaatctgtgtatttgaaagacatttaaatacaacctaaaaacagcagtacgacagcttctcattgaaatcgtcttactgctgttttctatttataatgcttcgtcttgaatgaattcattatgcctatttgacacattattgaagttttcctaatgcctggatcatttataatttacggcttcgtgctatgttttggtacataaagctttgacatatcgatattctccaactctaacaacttaattttattattaatcgttccaccgaatcctgttaagctacccgttttaccgacaacgcgatgacatggcacgataattgataatggattgcttccaactgcacctccaaccgcttgggctgacatttttggcttatcaagcagcttgcctacttttttggcaatagcaccatacgttgttaacgtcccataaggaatctgtcttaattcgttccaaacacactgttgaaaatgactacctgttggctttaaaggtattgttatttcaggattatcgcctttaaaatacgcgtctaaccactgtgtcgcctctttaaatatcgctaaagacgtattttcttccctagtaccatcatcttgttgattttcaaacaaaacagcggtcagacttaccccatcactcacaagttccaatcgtcctacaggagaatcataatagcacttataatccataaaaatgccccctttttctaatcatacgccttaattgttaatttagaaaatattcatgttcacattttttaaaaataaataagtcgtcaattacgtatataaacacgtaataccagctatccctttactgcaatatacagttacataacttactacacgtgctaacctcttactttgtaaatcaaatcttaaattaaaatattgaaaatgcaatggatccttaatattttattaaacatatatttacttattaaaaacaacacacaatattcataaagttttaaaaatattctgttttatcacctattattagtggaaaagtacaattgcaattgtatatagtttgcataacgcttcaaaagtaatttcttttttgtttagttcaaaaaaatttagaggtgatgttatatgaataacggttttttcaatagcgactttgattcaatttttcgaagaatgatgcaagatatgcaaggttcaaatcaagtcggtaacaaaaagtactatattaatggtaaagaagtttcacctgaagaactagcgcaactcacacaacaaggtggcaatcactctgctgaacaaagtgcgcaagcttttcaacaagcagcacaaagacaacaagggcaacaaggtggcaacggcaattatttagaacaaattggccgtaaccttacgcaagaagcacgtgacggtttattagatccagtcattggtcgtgataaagaaattcaagaaactgctgaagttttaagtagacgaactaaaaacaatcctatattagttggagaagctggtgttggtaaaactgcgattgttgaaggtttagcacaggcaatcgttgaagggaatgtacctgcagccatcaaagataaagaaattatatctatagatatttcatcgcttgaagctggaacgcaatatcgtggcgcctttgaagaaaatattcaaaaattaatcgaaggtgttaaatcttcacaaaatgccgtactattctttgatgaaatccatcaaattatcggttcaggtgccacaggaagtgattcaggtagcaaagggttatctgatattttgaaacctgcattaagtcgtggtgagatttctattattggtgcaacaacacaagatgaatatcgaaacaatattcttaaagatgctgcattaacgcgcagatttaatgaagtacttgttaatgaaccaagtgctaaagatactgttgaaattttaaaaggtattcgcgaaaaattcgaagaacaccatcaagtcaaattaccagatgacgtattaaaagcatgtgttgacttatcaattcaatatattccacaacgattattaccagataaagcaatcgatgtgttagatattacagcagcacatttatctgcgcaaagtccagctgtcgataaagttgaaactgaaaaacgaatttctgaattagaaaatgataaacgtaaagcggtaagtgctgaagaatataaaaaagctgacgacattcaaaatgaaatcaaatcattacaagataaattagaaaatagtaatggtgaacatactgctgttgctacagttcatgatatttcagatactattcaacgattaactggtattccagtttctcaaatggatgataacgatattgaacgtttaaaaaatatttctaatcgtttaagaagtaaaatcataggtcaagatcaagctgtagaaatggtttcacgtgcaattcgccgtaatcgcgctgggtttgatgacggcaaccgtccaattggtagtttcctatttgtcggccctactggtgttggtaaaacagagcttgctaaacaattagcaattgatctatttggtaataaagatgcacttattcgacttgatatgagtgaatatagtgacacaacagctgtttcaaaaatgattggtacaactgctggttatgtcggttatgacgacaattcaaatacgttaactgaaaaagtacgccgtaatccatactcagtcattctatttgatgaaatcgaaaaagcaaatccacaaattttaacattattactacaagtgatggatgatggtaatttgactgatggtcaaggtaacgtcatcaactttaaaaacacaatcattatttgtacgtcaaacgctggttttggtaacggcaatgacactgaagaaaaagacattatgcatgaaatgaaaaaattcttccgccctgaattccttaaccgcttcaacggcatcgttgaattcttacatttagataaagatgcattacaagatatcgtcaacttattattagacgatgtacaagttacattagataaaaaaggtattacgatggacgtttctcaagatgcgaaagattggttaattgaagaaggttatgatgaagaattaggcgcacgcccattaagacgtattgttgaacaacaagtgcgtgacaaaataacagattattatttagatcatacagacgttaaacatgtggatttagatatcgaagacaatgaattagtcgtcaaaggtaaatcatgatactttaacatatagcgtatcaaaaaatgagcatcaggacgccctcgcctgtgctcattttttaaattatttcccaggaaaatgattcgctgtgtgttgttctgttccacaacaatcacgatcaatgtcacatgtaccacattttccttgtttcgaacgtttgaaaaatttaactaacgtatacaaggcatatccgaaaatcgctaaaaaaattaaaatattaataatgactgacactttaaccactccttaaacaaataaatgtccaacttgataaaagatgaatgttaagacatatgcagtgactagaggataggcaactgcaagtgccgtccatttccatgaataagtctctttacggattgctgccactgtagaaacacaaggaatatacaatagtataaatatcataaatgcatacgcagatagcggtgtgaattggttttgaatcacattaacaaggcctgcatcacctgatgaatagataatcgccatcgaacttacgataacttcttttgctaaaaatcctggccctaacgtagcacctgcttgccatgttccaaatccgagcggttgcactaacataccaaagaagctaccaactatatgtaaaaaactttgattgatattcacattgataccatgtggtcctatataacttaatagccaaatgactactgagccgccaaaaataaaagtacctgctttacgaacaaagcccttagccttttcccaagtactacgccacaacgttttaatggaaggcacacggtatgttggcaattccacaataaagattgcattatcattttttaaaaccgtcttagtaagtactgtactgactaaaaatgccataataatccctaaaacatacaagcttaatactactaaagattgattctctttgaaaaagatacctccgaacaatgcatacactggaagtctagcagagcatgacatgaatggtgcaattaatatcgttgttaaacgctctttttcattttcaatactgcgcgcagccataatactcggtacgttacaaccaaatccgataatcatcggtataaaagacttcccgcttaaaccgaaagattccataatacgatccattaaaaccgcaatacgtgccatataacctgaatcttctaataaagatataaagaaaaagagcacaacaatttgtggtacaaagactaatactgatcctacaccagcaataatgccatctgtaattaaatcttgtaaaaatggtataacgccaagataattcataatcgtcttcacactatccgtaaatgtaccacctataaatgcatcgagttgatccgacaaaggtgtgccaatccatgtaaatgtagtttgaaagatcaaccacataatcgctagaaaaataggcatccctatatatttatgtgttaatatcttgtctattctagagctgaaatattgcttatcttcatctggatacgttaccacgtcttgcaataacgtctcaatataatgattgcgtatacgttccatctctcgacgaacagatacagcctctacttgttcagcaacttgatcacgtaaactcgacaatttatttacaacctctgaattaagttcatttgcaatttgcatgttatttagtaagaattgaatcgcaataaatctagcttgatatttatcatgagatgtctctgtcattattatttgacacatatttttaattgtctcttcaatcttctcatcataattgattttaaaatgcggttgatacccttcccctagatgctttatttcgccaagtaaatgtttagttcctttgcctgtacgtgccacaactggaaaaataggtgtttttaactttttcatcaatttatgataatcgatttttatcccgcgctttgtagctacatcaatcatatttaatccgatgtatattggttgattaagttctaacaattgtactgttaattgcatatttctttttagttgactcgcatcaacaatgttaatgattcctgaaaaagaatcgtttaataaatagtctgtcactacagtttcatctttagaaatcggcgataaatcatatgtacctggtaaatcaattaattgtcctacattttctttaagcttccctacttttttctctaccgttacgccactccagttgcctatatattcatacgaaccagttaaagcgttaaacaaagatgttttaccaacattaggatttcctaaaatacaataattttccattcgtccggctcctattcttctaatgcaatagaacaagcatcgcaatgtctaatacttaactgttgtccgtttacttcaataatacatggccctttaaataaacatttttgtttaatcgttatgatagcgtcatctgttaacccaaaggcacttagacgatacaacatattctcattagcaatatccattcgctttattttataagccttattcatttcaccatttttaatgtttaacatactatttcgctctcctattagaaataataatcattatcacttaaaaatcataacccttaaaattgtagctcgcaatactttatttaaataattttcatttttcatgtaaaatttgtgacattgcaaaaatgttttgtataatcgcttccatgcaaaaaacctccgcttcaaatgtcattgatagacatttaaagcggaggcatgtatatgttattttatgatttatttcttaagtttttttctaacaattgattgagcttttcaatatttttattcaactgttctatattcgtggcttgttgttttgaatttagttgatgcttgttttgataatccattaaagcatcatataagaacaatgaacttgctgattgctgtttcacttcttggtacaatgccatcgttttatcatctagtactattgaacgtacatcatcttgcccatgtacatcttgatttttcgatacatttgttgcaccttgtggatatactttaaaggttgtgtcgtatgtttccttactatctttagcttcagattcctgtgattcaaccgttttatatttttcaagtgcatgtccttcaatatcaactcgtggaataatgcggttcaaccatgctggtaaataccacgaaccttttccaaacaatttagttaatgcaggaattaacatcattctgactacgaaggcatcaaagagtacaccaaacgctaatgccatacccattgatttaatcatgacatcttcttggaatacaaacgcaaagaagacactaaacatgattaatgcagctgctacaataacaggaccactttctttcaatcctactttgatagaataatcattatcccctgttttactatattcttcatgaattcgcgacataaggaagacttcgtaatccattgctaagccgaatagtataccaattgtaataaccggcaagaaggctagcattggtcctgtcgtttctatgccgaataatcctttcataaagccatcttgcatcacaaaggttgtaaaacctagtgttgccattaatgacaagacaaatcctaaaactgcttttaacggtattagaattgaacggaagacaatcattaataagaaaaatgccaatacaacaattactgttgcaaataaaggtatcgcctcatttaactttttagacatatcaatattaatgacactttgtcctgaaatttccgttttaaatccatatttatcttgcgcatctttattataatctcgtaaatcatgtactaagtcatttgtactttctgcattaggtccatgtttaggtatcacaaccatcaaagcgtaatcattatctttactcatttgtggcggcgtaacaatatctacatttttcttatctttaatatctttatacacagattgtaaatcttgttgtaatccttgtggatcatcttttttatctttaacgttaatcagcatcggtatttggccattaaatccttcgccaaatttatccgagataatatcgtaagcttttttctgtgtagaatctgctggtttaacaccgtcatctggaatgccaagacgcatatgactaactggaatagccgctgcaactaatataattaaacctaataatactgctgcaagtgcattaccagtaataaatttagaccacggcgtatcaatatcttttttaaaattagactgcaatttgttcactttaatgcgtttatggaaaatgctaattaacgcaggtaataaagtcagtgtactgaatacagcaaatataacactaattgccgaagcaaaccccatcactgctaagaaatctatgccaactagcgataaaccacatacggcaatcacaactgtcacaccagcgaagatgactgcgctacctgctgttcccactgcaagtccgatacctttaacaaagtctgtttcagttttcattacttgtcgatatctaaacaaaataaataatgcataatcgataccaacagcgagcccaatcattaccgctaaagttaatgtaacattaggtatatcaaagacataggtcaataggctaataatgccaactccagatgctaaaccaatcaatgcacttataattggtaaacctgcagcaataactgaaccaaatgtgattaataacacaacaaaggcaacaataataccaactaattcagaattaccgcctacttctgtagatgtcatacctgttcctgttaattctgtttgtacattatgattatcacgtaaatcttttaaatgatttttaacattatctctagacccatcttttaaagatgtttgactaacgtcatatgtgatatctgcaaatgctgttgttttatctttactaatttgcttattttcataaggatctgatattttatcaatgtgcttgtcatcttttttaatatcatcaaacgttttcttaatatctttagtaatactcggttgtagaattccatcatctttagtcgtcttaaagacaacacgtatttgtgccttttcactatcttgattaaaatgtttttcaatctttttattcgtatctaacgactctaatcctgtcattttaatatcattgtcaaatttcggtgcatttgtagcaagtggtatcaatattgcagctacaataattacccatgcgattaatgtggaccacttatgttttgcgatgaatgtccccatcttatataaaaattttgccaaagtatattgcctccttttaaaatcaacgttatagtttaactatacagtgtagattattgtttgattatagtatctatccccgacctcttaaagaatcaattggaaaattttgtatattaaactacacacaaaggagaaatgtagatgaaagagactgatttacgagttataaagacaaaaaaagcattgtcaagcagcttgctgcaattgttagaacagcaattattccaaacgattactgtcaatctaatttgcgacaacgcactcgtacaccgcacaacattttataaacacttttatgataaatacgatcttcttgaatatttatttaatcaattgactaaagactactttgctagagacattagcgatcgccttaaccacccatttcaaacgattagcgatacaattaataataaagaagatttgcgagatatcgcagaatttcaagaagaagacgctgaatttaataaagtattaaaaaatgtctgcattaaaattatgcataacgatatcaaaaataatagagaccgtatcgatattgacagcgacatcccagataatctcatattttatatttatgactcgttgattgaaggttttatgcattggataaaagatgaaaaaattgactggcctggtgaagaaattgataaaattttccataaggtcattaatattaagattaaatagtaaattagaggctcataagcgttaccaacattcataataaaaacgatagtttacacattaatgaattcgtgtactactatcgtttttttatttttatcgtgcttatcgctattaaaataactgatacacaacacataaactatgaagaaaaaaataaatccgctatctaaatgactttgactcagttgtttaaatgaccaaattgctaatgcaattcccattattattgaaataacgtatctcacattcttatacctataagccttttctaaaaatatggttgctattacttaatttttaaagttataaataaaaagagccaaccgcaatggatggcccttgttcattatgaagcattagaacatttctgaaacaaccttttgttctaagaagtgtaataagtagtctgggctacctgttttagcgtccgtacctgacattttgaaaccaccaaatggatggtatccaacaactgctgaagtacagcctctgttaaggtataaattacctacatcaaattcgtttaccgctttaatccaatgctcgcgattatttgtaatcactgcaccagttaaaccgtaatctgtatcatttgcaacctcaattgcttcatcaaaatcgttaactttcacaaagccaacaactggaccaaaaatttcttcttgcatgattctatctttagatttaagtcctgaaatgattgttggttctacaaagtaaccttttgaatcatcagtgccgccaccttgttctaatttaccttcttctttaccaatttcaatataatttttaatcttatcaaattgttttttattaataactgggcccatatacgtattgtctacagtattgcccaacgttaattcttttgttagtttaattgatttttctaatacttcgtcataaacgtctttatgcacaattgcacgtgaacatgctgaacatttttgaccagagaaaccaaacgctgacgttacaatagcttctgctgccatatctgtatcaatattttcatcaactacaatggcatctttaccgcccatttcagcgataacacgtttcaagaagttttgaccttcttgaacaacggcactacgttcataaattctagtacctgtcgcacgtgatcctgtaaatgtaacaaaatgcgtatctttatgatcaactaagtaatcaccaatttctttcggatcaccaggaacaaagttaactacgccttttggtaatcctgcttcttctaaaatttccattaatttataagcgatataaggtgtatcctcagcaggtttcaataacactgtattacctgcaacaactggtgctaaagtcgtaccagccataatcgcaaacgggaagttccacggtggaattgtaacacctgtaccaattgatttatagaaatatttattgtgttcaccttcacgatcaagaactggcttaccttgagccaaatccatcattgaacgcgcatagtattcaataaaatcaataccttcagctgcatcaccaactgcttcatcccatggcttacctgcttcataaaccataattgctgcaatttccgcttttcgacgacgaataattgccgaaacacgtaacataagctctgcacgatcatttgctgaccatgttttccaagatttataagcttcgttcgctgctttaaatgcatcttcaacatcttgttttgttgcctttgatgcatttgcaatcacttgtgatgtgtctgcaggattgattgatttaattttgtcatctttgaaaatcttctctccattaatcactaatggtatgtcttgacctaattctttttccacgtctttcaatgctttcttaaacatattcacattttcttggactgaaaaatcgtaaccaggttcatttttaaattctactaccatgtacacttaccccctataaattttgaaagtggtttaaccctttgatttaatgatataacatcatttaaactcattttactatgagtaaggtcgtttttgcaatcgctttcatttttatacttcatcccttattctcaagtattttgaaatggattggttactttttaaaatttagaagtgtcatgacaactaatttagtgtttcatcgttcaatgcttctgatggtacctcattatcaattttacgaacgactttacaagggtttccaaccgctaaactgtgtggcggaatatctttggtgacaacactaccagcaccaatcacactgccttctccaatcgtcactcccggaagcacggctacatgtccgccaaaccaagtattactgccaatattaattggtcctgctttttcaaatccttcatttctatgatgaaaattaagtggatgtgttgctgtgtagaatccacaattaggtcctataaaaacattatcgccaattgtaatctgtccaccatccataaaataacaattggtgtttacatagacattttttcctagtttaacgttccaaccataatctgtatcaaaaggaatcgaaatacttacattgtctgttgttgtttgaaataattcatcgattaattcctttcttttatttttgtcactcggctttgtatgatttaattcaaagcaaatatctttcgctcgtgcacgttcattgattaagtcttgatcaaagtttgcatcataccatttttctgctaacattttttctttttcagtcattacacctttcaactcctaataacttatttacttgtttaatagttaatcaaataaacattcgcctatgcaactaatacgctataacattatgaaatcatgaccttatcactcttatctataccattctcgcatcaaatactgctaaagtagtagataaattcaatactacagacgcattcattttttaatctattaacgtaaaatgtgagtaagagaaatataaaggagtatgatagcgatgagaatattaattacaggcacagttgctatcttaatcattctaggtttagttaaaacgatacaagattacgaaatgacaaacgacacaagtcgtcagttgtcagacaacaaagatgacgataaagtcatccatcttaataatttcaaaaatttacatgcgaaggaatttaacccatctgatttcttttaagtcacctaagaattgcaaatccagaagtcatttaagttttacctttcattcatacatcctttaatattaattacgacttcttttatatagatgctaaatagagagattgttgtgcaatgtttgcacggcaatctctctttttctttttaaatttggtaaaagtaaaacgcaacgattgacttatatacctatagggggtacattagacgtgtaacaatgaatcacagggaggcaataatgtggctaatacgaaaaaaacaacattagatatcactggtatgacttgtgccgcatgttcaaatcgtatcgaaaagaaactgaataaacttgatgacgttaatgcccaagtgaatttaactacagagaaagcaactgttgagtataaccctgatcaacatgatgtccaagaatttattaatacgattcaacatttaggttacggtgttgctgtagaaactgtcgaattagacattacaggcatgacttgtgctgcatgctcaagccgtattgaaaaagtgttaaataaaatggacggcgttcaaaatgcaacggtcaatttaacaacagagcaagctaaagttgattattatcctgaagaaacagatgctgataaacttgtcactcgcattcaaaaattaggttatgacgcatctattaaagataataataaagatcaaacgtcacgcaaagctgaagcgctacaacataaattgattaagcttatcatatcagcagtattatctttaccgctattaatgttaatgtttgtgcatcttttcaatatgcatataccagcactatttacgaatccatggttccaatttattttagctacacctgtacaatttattattggatggcaattttatgtaggtgcttataaaaatttaagaaatggtggcgccaatatggatgtacttgttgctgttggtacaagtgcagcatacttttacagtatttatgaaatggttcgttggcttaatggctcaacaacgcaaccgcatttatactttgaaacaagcgccgtactaattaccttaatcttattcggtaagtatttagaagctagagcgaagtctcaaacaaccaatgcgcttggcgaattattaagtttacaagctaaagaagcacgcattttaaaaaacggtaatgaagtgatgattcctctaaatgaggtacatgttggagatacacttatcgttaaaccaggtgaaaagatacctgttgatggcaaaattattaaaggtatgactgccatcgacgaatctatgttaacaggtgaatctatccctgttgagaagaatgttgatgatactgtaattggttcaacgatgaacaaaaacggtactattactatgacagcaacaaaagttggcggggacactgcgttggcaaatattattaaagttgtcgaagaagctcaaagttctaaagcgccgattcagcgattggcagatattatttctggttatttcgttcctatcgttgttggtatcgcactattaacatttatcgtgtggattactttagttacaccaggtacatttgaacctgcacttgttgcgagtatttccgttctcgtcattgcttgtccatgcgcattaggacttgctacaccaacttctattatggtaggtaccggtcgcgctgctgaaaatggtattttatttaaaggtggcgagtttgttgaacgcacacatcaaattgataccatcgttttagataagacgggtaccattacaaatggtcgtccagtcgtgacagattatcatggtgacgatcaaacgctacaactacttgctactgctgaaaaagattctgaacacccattggcagaagccattgtcaattatgcaaaagaaaagcaattaacattaactgagacaacaacatttaaagcagtacctggtcatggaattgaagcaacgattgatcatcaccatatattggttggtaaccgtaaattaatggctgacaatgatattagcttgcctaagcatatttctgatgatttaacacattatgaacgagatggtaaaactgctatgctcattgctgttaattattcattaactggtatcatcgcagtggcagatactgtaaaagatcatgccaaagatgctataaaacaattgcatgatatgggcattgaagttgccatgttaactggcgataataaaaacactgctcaagccattgcaaaacaagtaggcatagatactgttattgcagatattttaccagaagaaaaagctgcacaaattgcgaaactacagcaacaaggcaagaaggttgcgatggttggtgacggtgtaaatgatgcacctgcattagttaaagctgatatcggtatcgccattggtacaggtacagaagttgccattgaagcagctgatattactattcttggtggcgacttgatgcttattcctaaagccatttatgcaagtaaagcaaccattcgtaatattcgtcaaaatctattttgggcattcggctataatattgccggtatccctatagctgcattgggcttacttgcgccatgggttgctggtgctgcaatggcactaagttcagtaagtgttgtcacaaacgcacttagattgaaaaagatgcgattagaaccacgccgtaaagatgcctagattccttaataatgaaggattcgttggtgattctgagataggctagtgattggctctataatgtcgcggtttacagttggatcttcgctccaactgcataagagccactaattattataaataataagtacactatggtttacagttggatcttcgctccaactgcataagagccactaattattataaataataagtacactatggtttacagttggatcttcgctccaactgcataagagccactaattattataaataataagtacactatggtttacagttggatcttcgctccaactgcataagagccactaattattataaataataagtggctctaaaaggaggtgaatgctatgtcacaagaaattttaaatgttgaaggtatgagctgtggtcactgcaaaagtgctgttgaatctgcattaaataatattgacggtgtcacttcagctgaagttaaccttgaaaatggtcaagtaagtgttcaatatgatgacagtaaagttgctgtatctcaaatgaaagacgcaattgaagatcaaggttacgatgtcgtttaattaggcaatattcaacgtcatcaacaccaaattaaaaaatcgaactgatgagaatcccaacaatccaaattatctcatcagttcgatttttaatttactcgtaacctagtatctccagtctgcaatacatctaatgttgcatctaatgcatcgacaattagattttcaactgcagcttcagtataaaacgcaatatgtggtgttaatatgacatcttccctgtcaatcaacgattctaacaatggatcgttcagtgttttgcccctttgatcacttgggaaaagtttgcgttcaaattcatacgtatcaagtgctgcacctttaatcacaccattgtctaatgcgtctaataacgccttagtatctactaaagaacctctcgcacaattgacaaatactgcgccctttttaaaatgtttaaataattcagcattaaatagataatgattatatttcgttgcaggtacatgtaatgtcacgatatcagcaccttcaaccgcttcctcaatcgtatctttgtaatcgacatacgttgcaattttagcattaggaaatgggtcatatgcgaccacatcactttgataaccattggcaaatatatcggctactacacggccaattcgacctgtaccaataacagctacttttaaatctttaatggctttcgataaaatagtaggttcccatctaaaatcatgctctcgcactttcgtttgaatttgattaaaatgacgaaccacattaatagcctgggtcacagcaaactccgcaattgaattcggagagtatgacggcacatttgacacaatcaagttatacttgtttgctaactccaaatcatatgtatcaaatccagcactacgttgtgcgatttgtttaatacctagttcatttaatcgtttataaacatgctctgataatggtatttgttgtgatagcgataagccatcataaccagcgacaccttcaacattgtcatcagttaatgcttctttagtaatatctacctcaacatgatgtttctctgcccacgccttgatataaggcatatcttcatcacgtacactcatgattttaatttttgtcattttaacatcacccttaactttattatttatataaatatgctaattctgttaatcttattgcagcttcgtctaattgctggtcatctaacgccaatgagattctcacatagcgattaccattctctccaaatggtttccctggagcaacaagtattgacttctctttcactaaaaattgctcaaattgctcgctgtcataaccaggcggtgtttccaaccatacatatatgccacctttagcatgaacaaatggcaaatcagcttttgcaagcatggcttcgaatcggtcacgacgtgctttaaatacattgctttgttcttctaaaaaatcatcataatgattcaaagcatatattgcggcatcttgtaatgcaccaaacatcccagcatttgtgtgcgtttggtactttttcaaagcttgaatcatatctttattaccaactgcaaaaccgactctaaaacctgacatgttataacctttagacaaggaataaatttcaatcgcaacatctttcccattttccgaagcaagtatactaggatttttagcgtcgaaaccgaaagcaccataagcaaaatcatgcacgattttagtgtctgtatctttaaatttagctatcgcttcatcaaaaacttctttcgtagctgtcgatccagttggattatttggatacattaaataaatgagttttgttttatctattatttgtgaatcaactgtggaccaatctggcaaataatgtggcggttctaaattaagcggaactggcttgccatcagctaaaagtacacccgctaaataatcagtatagcctgggtcaggtagtaatacatagtctcctgggttaataacacatgtcggtactgccactaatccattttttgtaccatataaaatacatacttcatcttctttatctaacgtcacattatattgtctttgataaaaatctacaatagcttgcttgaacacttctttaccatgaaaagcaccatatttttgattttcaggaatagttagtgctttttgaaaatgatcaataataccttgtggcgtgggcccatcagggatcccaactgccatattaattaatggcaatggtccatgttcgattttacgtcccatcgttttcccgaaataactatcagggatatttgctaatttgttagaaatcatcaaattcctcctctatcattaaacatagcctgggcgactatcataatcctaacaacttgtatcactctcatttagatggttacaatgacatcgccattcaccgttatgttcaacagaatttatgacacacgttgtattgaatgaatttattttcattttaggtaggtacagtattattgtcaatattaggaattttcagattaatatacactcaatcgttaggatttaactgccatgcatatccgcatgcgcaaccagttagatatgcttatataaagtataacgcccatcaaggtacgtattcaaacgtgaaccttaacaggcgtcattcattgttaaataaaacttcttaagcacatacttatttcactatgccttttacgttccccttatacttttctcacatctttctctcagactactcccttacacgccttgctcaatatctttaatcatttcatctacagttattttcgcactcgttaagacaataggaacgcctgcacctggatgcgtacttgcacctgcaaaatataaatctttataatctcgcgatacattttgtggacgataataattactttgcgctaaagttggcattaaaccgaatgccgaaccaaatttcgcatgatacgtttgctcaaaatcatttggcgtaaagattgtttctgaaacaatatgcgattttatatcttcaaatacttcaattgttgctaatttacgataaataatttcctttatttgttgcgtcaaagcttcatctgaccaatcgattccgctacctgttttaagttccggcgtcggcattagcacataaataccagttttgccttctggcgcaagtgatttatcagcgaccgctggtacatacacataaatagaaggatcatatgataaacgtccctcaaatatttcttcaatattgcctctaaagtcatctgaaaaaataacattatgaagtctcacttgatctgtcacatcaatatctataccgatatacattaaaaatgctgaacaagagtaatctaagtctgcaattttatgtggtggatactttttaataggtgcaaaatctggcattaatgattccgcaacactagggaaatcagccgtacataaaattttatcaaattttcttatgtcaccattcacttttatcgcatcggcccgtttgaatttaggatcaataataatttgctcaatttcagcattaagttcaatattaacgcctaaatctttatttaattgcgctagcccttgagccatgccatacataccgcctttaataaaatgcacaccaaacatcatttcaatcataggaataattgaatatagtgacgggcctcgttttggatcaattcctatgtataacgtttgaaacgctaaaagcttttgtatcttttcgttatcaatataatgttcaattagctgatctgcatgatttaacgtttttaacttagcaccttgcacaagtgacgtcatattataaaagtcacttggtttgcgatacgttctttctaagaaatagcgacgggcaatttcatattttttataaacatccgttaaaaaggacataaaaccatgcgttgaaccaggttctatactttctagcatgtgctgtaattcagctaaatctgtaggcaccgttatacgatcatcgcggtcaaaatacacatcgtaaatataacgtaattgtctcaattcaatataatcttcataattttcaccacacattgtaaatacatctttataaacatctggcatcatgacaattgtgggacccatatcaaatgtaaagccgtctttctttaattgattcatacgcccacctacattagtatttttttcaaatatcgtcacttcatgaccttgagaagcaatacgggctgccgctgctaatcctgtgacacctgcaccaattactgcaatcttcattattcaaccacctatattctatgatatttactatttatttcatgaaacaactttgcttttttccgcttatccacaaaaacacgttcatgtaatgtatagttagcctgtctcacttcgtccagtatttcaatatatatacgtgctgctaattctatgattggttgtgcttcaatactaaatactttgatttgatccataacatctcgaaaatctttttctgcgatagctgcataatattcccataagtcaatataatgattattaccaccattttggtacacttcagcaatatcaacttcatattgctttaatcgttgcttactaaaatatatccgttcattttcaaaatcttcaccgacatctcttaatatattaatcaattgcaacgattcaccaagccttcttgcgacatcgtatgtctgatgtgtttcatgatcacttaaaatcggcgtcaatacttcacctactgtaccagcaacaccataacaatatccgaataattcagcgtccgtttcaaacattgtaaattgttgatctttatatacagtatcaatgagattatagaaagattgaaaggcgatatttttatattgtgcaacatgctgaagagccctcatgattctacgatcactatgaaagtgatgatgttcatatgggtatttttcaatagattgtatatcttcttttatttgatttaaaaattgaatatcgccataaacatctatactgtcatcaatcttacgacacacagcataaattgcccaaaccgcttttctttgatcttctggtaacaagtcaaaagcgtaagaaaagctttttgaatgtttcttcatgattttatgacaatatttaaaattcatagccatcattgtcatactagtcctcctatattgaaatgccattaccttgatttattgttctttagatatagaatattgacgacctttccattcaactacaccataacgatgcgtttgtttccaagattggatgaaaattttagtaaaaaacataaataacaatggatgacataccattaataaattagaaaattggccgacccttcgatgcagataaataaattgtgtagtatagctcaagtaaactgttaacatttttcctacagacatttggcgatattttaaactaagacatagccccaaaatactcgcaatagaaccgaacaaccacaatacaattgctgtcatgatcttaggctttgtgccacctgccccagttgacaaatgctttgtccatccttcttgtaatgactgaaatccttcttgatacatgcgaaatgcaacaaatggaaatccttcataaactgttacgggtaatgatagtgaagtatatgcacttcctaaagcaaatccttcaataatatgacggttcgcacttttatgacctccagttgcataataatcttctttatttgttaatgtcaccggtccaaatgcatgctggttagtccgaccgtcgtctaaggtagaaaatacattcataccaacgactgtcattaaattaaatatcgctgaaaacccttcgtagaaacgctttgttatatgataaggctgtacgcttaacaatcctttttcaccttgtaattgatactgattaatcaacgtttcaacagcatccttccttaagaaagttacatcagcatctacaaaagcaatacgattcgtacatgcatgcgtcacaccttgataacaagcatgtgatttcccataccatttgccgtcagcatcatcaacaacatctactacagtcgcaccatatgaacacgctacacgtgctgtttcatctgtcgatccgtcattcataacaatgacatctactggaacttgctgttgttgtatcgaatgtagtaaatgacctattcttttttcttcgtttctagccggaataataattgttaatgctttatgattgaaattcagcgttttcgcctttagctgatgcctacgattaaatatcaatgcaccacacgccatagacatggtcactattactgttaatattcgtgataaccatttcatagatatcacttcctattcttcgcttctcgcgcgtttattttgtctgagacttgttgcccacttaatgtaaccattggcatgccaccaccaggatttactgatccacctacaaagtacaagttttcaaaatactgactttctttaggaaatttaaaccctttgtttttctttttatctgctacaacaccatatattgcaccacgattagaacgataatttttttcaatatcctccggtgtccaaacatcttcataaataatgtgttttcttaaatcagtaagtcccattttttctaatttatccaaaattttatccctaaacttcgcataatcttcagttgtaaaaggctgatcttgaatatatggaatatgtggtaagactttgatattttcataacctactggtgcttgtgtgtgatcagttttattcgtatttaccagataaatggtcggatcatctggcaataccttttcatgaaaaacttgatgataattgagataagcattttccgtaaaaaagaaattatgatgtgctaattgcgggtattggcaagcaacacctaaatgcatcacatatcctgagcttgctggctcaaattcccgctctaatttgtttaatcgttgagtatcaaggtgaagtaaatatttataagtaggtatgacttccatatttgaaataatataatctgcctttacaaactcacctgtatctaatctgacacccgtcacacgtctttgatatgttttaatattgtccacacgtgtacctgtatgaattgtgacaccttcttcacgcgctagcttttccaaggcattggctaaatgatggatgccaccttctacataccaaaggccttgctcttgttgcatatggaataacatagataatacagctggcgcatcgtatgatgaagaacctacatatttgataaaatagcctaacatttgtcgcaagtatggattcgagatacgcttgtctatggcctgttgcatagtatgtacataatcataattaataagtgcatttaatggcccatgaaatttaatagtttgagatagtgtatctaaaccatagttaaaataccctttttcagtaatacgatcgattcgtcttgtataattcaaataattttgcaattcctctatatcctgtttcgacaatatcgcattatgctgacctgtttctttaataccttcatacaaatcgatagtcgttccatctggaaaaaagctacgccattgatgtggcaatcgcttgattgtaacgtagtctgacatttgcttcttgctatattcgaataatttttcaaaaatataaggcatcgttaaaatagatggacctaaatcaaagccaaagccatctgattcatgacgattcactttgcctcctatatgattattttgttcatatagtgagaccgaatagccactttgtgccattcgaattgctgcagaaatcccacctaagccaccaccaataacgatgatatgtttagtcatgacgttcacctcttcgttttaatatgcgtagtaactgcgttaatctcggtcgattataacgttgcacaataatgattggaacattagctatcattgcatagaaaacatttatatactttactaaaccagggcctttaatgaatatgattactggaagtatcgatatccaatggatcaactctgccctctttgtctctataatcattttttcaatttcatcagtattgattgtcattaaatgacgctgatcatatatattttgattaagctgatgaccatctaaaatcttatgtttccattttcttacgtaaaaccatttgttccaaaattttccatgcttctcaaagttaaatgatttaaatattatatgcttctgacgaaaatacttgtcaggaactcttgtacctaaatttgctatatttagttgaactattaaccaatacatactgcagaaaaatgctgttttgatatatttttttatgattttcatttaaattgaatcactctcaatcatacccatatagtataaattgccattttattacttagttccctaaagattagtgaataaaccgctctcatttatatttatataaaacaaaaacgccaatactctcatgttagagaatattgacgtcatttgatttacatttgattaatgaatgaaattatatgaacctgcttggtttgctgaaattgtacgagatgtaaccacaccagcaccatgtccatagttcatttctgaaacacgaacagaaccgttactgttaacgccttcaacgtaagcaacatgaccgtaatagccttgtgttgtttgcatgatagcaccagcttttggtgtattgttcactgtatagccagatgatgcagctgcgctagcccaattactagcattgccccatgttgaaccaattttcccaccaacacgatcaaatacataataagtacattgtcctgaagtatataagttacttcctgatgcataaccattagaaattgaacgaccatttgaagatggcactgcagttgtagtcacatgaacattattgcttgttgtgctataacttgcacctgaaccaccagtgtaatagttatttgttgctgtttggctattgtttgtatagttattgtattgatatgaatgattatagtagttattgtaagatgcattgttataactataagtattgtagttgttgtagtagtatgtgttgttttgcgttaattgacttggattccaatttcctgtccaagtgtaatgataattaccttgtgcatcaattgtatacgtatagctgtatgattgagcgtcattagaattatatccattgttattttgttctgcggcttgtgcatcatgtcctgcaaatgcgatagtggcaagtcctgctgtagcgattgtagctgtaacgatttttttcataattaaatatcctcccaataatcaaaacactctatacatatagtcattagcgactcaattattttaaattttatattttttatttttttagtatgcaaataattataacttttatagttttgcgacaaaacaaactataacagagattaggtgtcttgcgggctttgttatcataatgtaatctgttcctaacaaagcatcattgaatgtaatataccaattagaatgtttacaacactttttctgcaccgttaacatgggatttgaaaataaaaaaagcactaaacttttaatgaaatacatcctttttgataataaatatcagaagtaatgtaatatttcaaaagtttagtgctttaagttatttcttatttgtagcatgtgtttccatcgtttttacaatcaaatcagtcaatgctttactacctgcatattctaaatgtatgccgtcatatgcaaagtactccggatgacctgcagaagctttataccaatcgactagatgtacattagagcgcttttcagctgcctcataaattaatttatttattctaccttcataatctctaggtactctaatagaaactaaatatatgtctgcttttccaaaactatccaatagttcatttaattgatctttcgtaaatgcgccatttgtaccaagctccactacaactttttgaccttttttagcatagtctttatattgcgatttcacaattggagtagcatcaacgagttgccgtccaactttaccatcaatttgtgcatttggtattttcttagtaaagacattaccaatatccaccatgaccgagtcaccaattaatagtggtgacgactttttaatatcctctttgctattcgctgtctgcttatcctcttgcttatcttttttaacgacttttttcttcgttgttttaaattccgtcttcttctctttcttctcggcttcatgttgtttgccaagtgcatcaaactgtccactgagcacaacgatagacggaaccaataataggataactaacacagttctagcaaattgactcttctttttaggtaaaaatgcaaaagctttaaatccttttttacgtataggtgtttcaataaagcgatacgaaatttcagccattaacgctgttaacaaaatttctataatataaacgtataccggtatttgtccttgtacgtaataactgttcacaaaaacaatgataggataatgccataaatataagctatatgatcgtttacctataattagcaaaggtttcatacttaaaaatttagcaaataaactagaaggatgtaccgcaatcgcaataatgaataaagttgcaaatgatataatgtaaaatcctccattatatatccattgatcttggtctccaactataaagaacaaagtcattagcaccgcaaaaccagatatccctataatatctaatgatacgacaatctttttagaaatatcttttttcaaagcaaacggaggccaaataaatgctaatatacaaccaagcaataaagtttgcagtcgtgtatctgtcccaaaatacacacgtgaattatctccagtgatgaaatgaatcactatcataagtcctaaagaaatcaacgacacaataaatagcgtttgaataatatttctcggtttaaatctatgtaataagaacgtgataaccaatgggaaaagcaagtaaaattgttcttcaatggctaaagaccataaatgtttgagtggttcaatagcaaattggttaaaataatctacattctgtgaaatgtaccaccagtttgaaacatagaatatagctgcaatagcatctcgtttcatttgtataatcaattccggtttaaatatcagtgtgaacgtaagcacgacacagattaaaaataacactgccggaatgagtcgtttcagtcgtcgcttccaaaactctagcaaatcgattttttgcgtccgataatactcacttatcaacaaacttgttattaaataacctgaaataacgaagaatgtatctactcctaaaaagcccccacttaaccattgtgcattcaagtgataaataatgattcctataactgcgaatgccctcaatccatctaatccgggtaagtatcgcggggaatacattttttctaaacgtttaaagtcttttgtatccatgttaataaacgccccatttatttttctctattttgtagcatatcacaatatttttgaaaataaaatattgcactgattttcattaattgatttaacccttaattaagatagttttaaattttttattaagtagaaaacaattattacagttaatttcattactgcaaaccacatataaatttgtcgattttactacataacatagattatcatagattcttgaatttttaacaaaataactattattttcattatatttttacaaaaaaaggttcgttttatattttatgcatcttactgtaacagaatcattaagatatgctattcgaatttactttttcaaagctgaataaactgacaaattaacgcgtactgttattaaaatatatacacggtgatatctttccaactcattttcaaatttaaccatatgaaatgacaaatactcactccatatttaaaaagaatcatggtgtattgtttatttcgccttattctaatttaatagtgacattaattcttctatcatgacattaaaatcgtcaggaataataaaataacatcctaacctctagaatcagactttaatttctaataaaaaaactctccccaatttctatgggaagagctatatatttaatgtttaaacattacttttattaattatgaaggaattagaatccccaagcgcttaaaccttgtgctttgtatgctttaacagctgcgttgatttgttggtcaacagtgtttgttggaccccaacctggcatagtttggaataaacctgaagcacctgatgggttgtaagcatttacttgaccatttgattcacgagcgatgattgcagcccatgtagaagctgaaacaccagtacgttgagccatgatttgagctgctgatgaaccagtagcacctgcagtattaccattgcttaatctcactgaacttgaagtagttgaagtgctgtagttatggtaagttggagctgaaacagctgcaacgtttgagttacttgattgtgcattgtagcttactgattgtacatctgaaccttggttgtatgaagtagtgtagtctgcacctgcaacgtttgagaaaccagcagtttgaccattagctgcttcatagctccatgaccatgtagtaccatttgaagtaaagttatattggaaaccatcttttacaaagtggatgtcatatgcaccatctttgattggagctgcatttaattgatcttggtgattatgcgctaagtcaactaagtgtgcttgatcaacgtttacttcagcagcgtgtgcttcatgtcctgtgcttgctgcgtaacctgttacacctaatgccactgctaatgatgatgccataattgtctttttcatagtaaaaaatcctccagtaataattgtaagtttatgtttttagtaattatattttgaatttgaatgtcgtagtgcaagtttaaattgtcttttatttctttcaacggtactcactatatcataaaaaaccagctagtaaattacactttctttacaaaacattacaatatcaagttttatttgtaatgttgaaatatggctgttttatactgtaatgtgaaatatgttccctttagaatccaatcaacccttgaaatagtctttaacacataagatttttactatgtttagctcaactattacaactttcgtaatattacagattgtatttttgttacatagctgtaatatatctgacatgtaacttctcttattttcgtacattaaacgaattaaaaagcaatcaacacatatatttctacaaatgtgttgattgctattattgttatatattcaaagttactatgcacacatcttttgtgaattatcttatcttttataagcacaaataaactgcaactcaattatattgctaaactttattctcgcaattcacaataacattaaataatttttggtctcatattttcaaaaaacatactgtccttatcccatgaatttaaaaatatcattagtatataaacgaaacactttacgataaatgatatctgcaagccaagctgttacaaatggcacaacaaagaacgctactacaattagtatgacactcaaccaagcagaatcaacctccataaatttaaatgcattaatcggtcctaccattcctataaaaccaaatccagctgactctttcgttccatgaatacctactaatgctgataccaaacctgatacaatggctgttgtcaatattggtaacataagaattggatatttcaccatattaggtatcatcattttaacgcctccaaagaagacggataacggcacccctaaacgattcactttacttgtaccaattatcaatactgcttcagtcgcggagataccaattgacgctgatccagctgctaaacctgtaatacctatcgcaaaggcaatggccacagttgatagtggagaaataataataagactaaataccattgaaatcaaaatactcatgacaatcggttgtaattctgtaaaaccattaaccatattaccgatggctgttgtaatcattttcgtatacggcaatattaaaacaccaattgcacctgaaataccgccaacaactgttgggaatacaatcaatgccatactacctacgcgatgttgaataagtaaaatgaacaacactgcaatcgctgctgtaatcattgtattaattaaatcaccaatacccgtaatcatccaagcaccatttttgaactgcgctgcaccgcttcctacatatgccgcacttgccacaacagcaattgctaatggcgataggtcaaatttcatggcaaccaatgcaccaatcaaagcaggtactgtaaattgaattgcaacgacaacgcctaataacgttttaaaaatcggatgataatccataaagtatttaaaaatttctccaagtatcgcattaggaactaaacccgcaacaatacctatggcgacacctgataaaactctaaatataaaatctttgggtgtaattgttttaattgatgtcataatatcatccttccatttatgtatatacatctttatgcaaataataaagagccttaagttataagctgccactagcttaaattctaagatgtgcatgccgatgttgttatatttaggctagcagtatcatctataactcaagactatgaaaaatagtatatcacaaaattctgaatttttagataaagaaattggcaatttttcaaacatattgttacaatacacttttattttatcttcatttttaaaatccattaatataatagaagaaagacattcaaatgcttaccaaaaaggtacattatttgttaggagcgtatcagcacttacatatcatcaatacaattgacaacataatagaagatactgataataagtgttaaaacaacagatgttaggtagtgaacaaatgatggaaagtaaatccatagatccaagaatcgttagaaccaaacaattgcttgtagatgcttttcttaaaatttctagagaaaagaaattatctcaaattacagttaaagatatcactgatattgctacgctaaatcgtgcaacattttacgctcatttcactgataaagaagacctcctagactacacattgtctgtaaccattttaaaagacttgaatgataacttgagcatttctaatgtcattaatgaaaaggtactgcgtaatattttcatttcaattgcgagttatatcaaagatgctgcaaagtcttgcgaattaaatagtgaagcattttgcaacaaagcacatcaacgtattaataatgaattagaagatatttttgcgattatgttagaaaacagctacccagagcatcaacgagatatcattgtaaatagtgcgagttttttagcagctggtatatcaggcttagcattacattggtttaacacgagccaagagacagccgatgtgtttatcgatcgcaacctcccatttttaatacatcatatagcacatttttaataaaacttggtatttagtcatgcatcttgaaatcactatgtgacttaggttcatacttgtacacacaataaaatttaacgtattacgattgattagccgtgtctaggacataaatcaacgtcctatactctacaatgccatattggcagtcgttaactgaatgaaaataagcttgtcattaaaacatagagattttagtgacaagcatttttgtttttgcgtacttaaacaacacttcaggcaatatgttgtttaggcaacaaatgatatgaccgtgtttattggcaaacgtacgacatagtagtatagtatgtctaaacaacacatgtcgcatagttgatatacgttgtttaaatactaagataggagggattgacgtgagcgagacagatgaacctcaggggtttgaacacacgcataacatattaaatattaatcagaatagtcagagtctaatgacattcattataagtaaattaaagtcgaagttgaagcaacacataataattgctcgtggtaataagcgaatcgactatcgactgtcgtataacttttacactacgtattatgataatgtagaaatcaagcaaatcgactgtgaatatacctatgcaatggccattgcaattttaataagacacacgatgtcattcgacaatgctcatttctttgctcagttacgtcatcctgtcttataaaacaacattgcagacatgtatatcaaacggcacttcaataacatcactttgccgtcgtactactattaaaatcgtgtctcaaaccccttattttaattccaaaaatctgctggtcaaaagaccgagaaactaaaaacattactgaatgtgttgataaattacctgatagaaataaactcaaaatatatcaacacttgattctaaggaggatatgacaatatgaaaattttagatagaattaatgaacttgcaaataaagaaaaagtacaaccacttactgtagctgaaaaacaagaacaacatgcattgcgtcaagactacttaagcatgatccgaggacaagtattaacaacattttccacaataaaagtggttgatccaatcggtcaggatgtcacaccagataaagtttatgatcttcgccaacaatacggttatattcaaaattaatatttgctcacgaggtattgcacttaaggtgccaactgacctcataaacaaagcccatacggattgaagacactaatgtgtcgaggctgggacataaatcaatgttctatgctctacgaagttatattggcagtagttgactgaacgaaaatgcgcttgtaacaagcttttttcaattctagtcaaccttgccggcggggccccaacaaagagaaattggattcccaatttctacagacaatgcaagttggggtgggacgacgaaataaatttttcgaaaatatcatttctgtcccactcccacattacgcttcatctctgtatgggctttttatttattcttttgagaatttcattttagcagactaaaaaattaaaatggtgtccatcaaaatctttgaacattgcaccataaaacccttggcttactgttggttcttgaacgactgtgccacccgcttctttcactttattcaccaactggtcaacttcttcatttgtgttcacacctagagaaatcatcacttcatttggttcagtgttaaggctttgctgacttacattttgaaaatgcttgctttctattaaaattacggttgtttgacctatttgaatgccgaccattttatctaacatttgtgggtttctatttattttaaatcctaacgctttataaaactgtgcgctcttttctaaatcttgaacatgcaaattaaaccacattgattgaatcatgattgcaccccattcattacttattatagtcttggactttaagccaatcacttaatgataattttgttggatttatttcagccattaattcaaagtctacttcataacctttttcttccaaccattgcttttctgcaacaccactaacaaattctccttctataacagtcgatttacctgtcacttcactaaaaattgttgctgcttcacttaatgtaacttcatcggaaccaatctctattgattgatgcgtaaagctttgtggatgtgcaaaaatatacgatgcaattttagctatatcaatagaagaaatcattgtgaattttatattcggattaataaattctggtaatgtaatacgttcatcttcgactttagcaatgcgtaaaaaattatccataaagaatgatggtttgataactgttgcatttatattagattccattaatctattttctatttttgccagtacttcaaagtgtgggccagttcgatttcgattaacccctcccgcagtactatacacaatatgttgaatattttcttgctcagctatttcaattatcttcatgccttgtcttaattcttcgttaacatcatctttaacgattggctgaatactgtataaaccatacttccctttcatcgctgattgcaaactaacactatcactcagatcaccttcaacgattgataaatgcggatgtcctatgtctgaaagtttacgattattcttatttctagttaatgcacttacataccatccatcctctaacaactgttttacaactgcattaccttgcttccctgttgcgcctattactaaaatatctttcattttagatccactccccttttatcttaaaaaccaataatcctctttttcaccttttaaatacgtatatggttctggtgtttgtccattttccttaatattgtcatttattacatttctgacatcccatactaaatgaataaatcgttgtaattgatgactaaaaatgcctagtggcgttttcatagcaaatactttttccacatcttctgtagtgacattcagtttttctgcaatcatttgaaccgataaggtagactcttcaaaatttgcttgcaactcttcagctgtaatacgtctttgctctttatttaaagacatacgcaacactcttttcttttatgatatttaatagttattgcaaattcattgctaactttcttaacacgttttataataaacggagagttatccgtttgtcaattttagagaactataagtaggtggaatcatgcgaaaagatgcaaaagagaataggcaacgaattgaagaaatagcgcacaaactttttgatgaagaaggcgttgaaaacattagtatgaaccgtattgctaaagaactaggtatcggtatggggacactatatcgacattttaaagataaaagcgatttatgctactacgtcatacaaagagaccttgatatttttatcactcagtttaaacaaattaaagatggctatcattctaattacgaggttatgcaagtgtcgttagattatcttttacaatttaaaatcgatcataaggcactactgcaatgtattgaagcaggcaacaataaattacgtttttaccaaagcacattttatcaagaattatttgatttttattatgacttgtttaaaagcgatgacgacatttacacgaagttcaaaacagacatgctgttgcaagcattatcaacacgtgtatttgatttccaaatagaacatcgcaatatttcaattgaagcgtatagaaattatttattaaacatttatttagatgaggtggaacgtaatgactaaaattgtgttaattacaggtggtaataaaggattaggctatgcaagtgcggaggcacttaaagcattgggctacaaagtgtatataggttctcgtaatgacgtaagaggacaacaagcatctcaaaaattaggcgttcattatgtacagttagatgttacaagtgactactctgtcaaaaatgcttataacatgattgctgaaaaagaaggtcgtcttgatatcctcattaataatgcaggtatatctggtcaattttcaacaccttccaaattgacacctcgtgacgttgaagaagtatatcaaacgaatgtatttggtatcgttcgaatgatgaacacattcgtccctctcttagaaaaatctgaacaacctgttgtcgtcaacgtatcaagtggtttaggttcatttggaatggttacaaaccccgaaacagctgaatctaaagtgaattcattagcttattgttcgtctaaatcggcagtaacaatgctaacattacaatacgctaaaggattaccaaacatgcaaatcaatgctgctgatccaggtgctacaaacactgatttagttggtgattttagtaataattcaaaacatgtttctgaagggatcaagccaattattcaattagcaaccattgatgcagatggcccgacaggtacatttattaatgggaatggtgaaatgccttggtaatccaaatttatgttacaaatattgaatttagaggtaaataaaaaatgcttctgcaatagatgcaatatacatgcaaaacaatatggaggcgaatcaaatgaaaagtattacgtttgaagaacattatgtcattgaagatattcaaaaagaaacgatgaatgcgatatcggcagatcctagaggtgtaccgatgaaagtaatgttagaaggccttgaaaaaaagacaggttttacaaatgccgacgaattatcacatcatgatgaacgtatccaatttatgaataatcaagacgttcaaatccaagtcttatcttatggaaatgggtctccttcaaatttagttggtcagaaagccattgaattatgccaaaaagcaaatgatcaattggcaaactatattgcacaatatcccaaccgctttgtaggctttgcaactttacctatcaatgagcctgaagccgcagcgcgagaattcgaacgttgcatcaatgatttaggattcaaaggtgcgcttattatgggacgtgcacaagatggttttcttgatcaagacaaatatgacattattttcaaaacagctgaaaatttagacgtaccgatttatctacatcccgcgccagttaacagtgacatttatcaatcatactataaaggaaattatcctgaagtaactgcggcaacatttgcttgttttggttatggttggcacattgatgtcggtattcatgcaatacatctagtattatctggcatttttgatcgttatccaaagttaaatatgattattggacattggggtgagtttatccccttcttcttagaacgtatggatgaagctttattcgctgaacatttgaaccaccctataagctattactttaaaaataatttttatatcacaccgagtggcatgttaacgaagccacaatttgatttagtcaagaaagaagtaggtattgatagaattctttatgctgctgattatccatatattgagcctgaaaaattaggtgtatttttagatgaacttggtttaacagatgaagaaaaagagaaaataagttatacaaatggtgctaaattattaggtttatcatctaacaattaacaaatggaggtcattgaatatggaaactttagaattacaaggcgctaaattacgataccaccaagtcggacaaggacccgtgctcatctttattcctggtgcaaacggtaccggagacatttttctgcctcttgcagaacagttaaaagaccattttactgttgtagccgttgatcgtcgtgattatggagaaagcgagttaactgaaccacttcctgattccgcttctaaccctgacagtgattatcgtgtcaaacgcgacgcacaggacattgccgaacttgcaaagtcattaagtgataaacctgtctatatattaggttcaagttcaggttcaatcgttgcgatgcatgtgttaaaagattaccctgaagtcgttaaaaagattgcatttcatgaaccaccaattaatacatttttaccagacagtacttattggaacgataaaaatgatgacattgtgcatcaaattttaacagaaggcttagaaaaaggcatgaaaacatttggtgaaacattaaatatcgcaccaattgatgcaaaaatgatgtctcaacctgctgatactgaagaaggacgaatagaacagtacaaacgtacgatgttctggtcaaaatttgaaattagacaatatacgcattcagatattactttggatgatttcacaaaatacagcgataaaatcaccctactaaatgggacagattctagaggctccttcccacaagatgttaacttttatataaacaaagaaactggcatacctattgtagatattccaggtggtcacttaggttatattcaaaaacctgaaggctttgctgatgtattattaaatatgtggggttaattgatcgttctctaataaaacagcttggacagttttcaaattatatttgatggctgaccaagcttatttttatttacgcttaaacgttcaaatcaactcgttattatacatgaaggcatgttaaccattctcttccactgaaaacactactgttccaaacattgatagtcttcttttgaaataccctttccgataagcaccaaatattctggcactttttttgaaaacgctacaggtgttaattcatattgtccttgtgtaaattgaatgagatacgtatgtgcggtgtcttcaaatgtcataaaccctttcaacctataaatatgagagggaaggcatgctaaacgttttataaactgtgctttagtacatttgactggtgattgcacaaattgatgattaatcatttgatgtaacgacttatgtttattgtcagaagttgctgtcatttgtctaactgatattggcaaagtgacgctgccatgcataccaacttgtatatcggcctctgggttaataacttctaaatctttcaatagtttgctcgtcgtttcaacatctgctgaatctattttattaacaaataagacagaacaatatgctaattgctcataaaataagccttggatgtctttagggaatgatttaatgtgtttatacatgcttgcgtctattacaccaatcatatgtgtaattgttgtaaacggagctaaaataggcgttaaacaagcatctaagacagagaccggttctgcaatcccactacattcaataaatacaatgtctggttgctcttttaaatataattgatgtaactgttctgatacatccgctttcattgcacaacagatacacccctctgtcagttcacttaaaggtatgtcttcagatactaaggcaccatcaacactcattttgccaaattcattcatgataactgccggtttcagcgactcatttaatgattcagcgagcaaatgatttaagacagtcgttttaccgccacctaaaaacccacctataataactattttcatctgcgactctcctcttatacttcatatgaatagcatattccaagatagctttcctattgactgacatgactctatattcagttatagttcatttcttttttaaataatcagcattactattttaacaatgatgcctacaccaataactaaagacaatgatgtcaccatttgctttccaattaattttagtgctgactgaccacctaaatgtttcaaaagcatcgtcattgtgaccgagcacgctgtaaatgttgaactaaaaaacacaagtagtagtaactgtgttgctgtcattccttgtaataaggcgccttgatgcaaattaaacaagagcatgccgtcttttcgaatcattgaaaataaaatccctggtgacaattctgacgagatgcctaataacgataatataggtgtaaatatttgtgataaaacattcaaaattggcgttagtgataaaatactaacaataagacagattgtgataaaaataggtagcgcttgaacgataaacatttgtatattttgccacatttgtagcaacatttgacgtatatttgacatatgtaattgcctatcataaggtagcggaacactaagttgttgatcattctttttcaaccatatcctattatgtaagatgccacctaaaagtactaatattaagtacggcataaatagccatgactttccagctacactaaaaatagataatgtcgcacctatttgataactacaagaactaccaaagcttattaaactcatacactgtgtcttcgtgcaggtatggcattggtgtgctgcttgtgaaatagctgctgcattacatccaaatccttctaatagtggcacgatatcattaccttgtaatcctatccgtaacattgaaggttcaattgcccatatcatccatgatttaagtcctgtttgatcaattacagcagttgataagctaatcaatattacgaccggcaatgcccatacgagcgaatatgttccaagtgatagcacaccataatcaccaaataatatatgctgtaatatatcgtgattgagcaatgttgtttgagttaaatattctatccatgctgatacatactgattttgaaaccaatctgaaaattgataagcgataccgattggtaatgcaaacattaaaaatatcaacaaccaggctaaaaatgtcgcacttattttaggtcttaaatgtcgtcgctcatgttgaaatagtgtcaattgttctatcacatgttcgctcgctataggcgaagaaactacactttctgctaatgaaatatctaatttctgttttatgattaataatcttaatttcgctttttctgttgcggtaagtttatccgcatgactaataaccaaataatgaggttcattaggtatgggcgtataatgccccgttctcatatcatatttcacttctaacatgtgcatgacacttcacaacatgaataatcatctagatacatttgatttttttggtaattttcaatgacctcttgtttagctggtaagccttcccgctgtgttaaaagatgtgcaagtactgcaaatcgcgctctgaatttatagatatagcataatttggcattatcattttcaactgtcgcaccaatcataaaaatattcggataacgtgtcgattcatcatgtgttgttaatttaatatcctgatttgttgtcgcaaataattgttgaacgattggattttttgttgcatcaaagccagttgctagtattggttcatgaggcgtaagcacactttgtccgctatcaaaactgatatgatactgtccatcgttaaaatcaatatctttaactgtataatgcacattcatttcaatgcgagctccttgcttaatgacattacctagtcgctgacgtgtataaggtgacaatctaacactaggatcagcatccggatcatttaaaccggttgtgctagtataaagtgcgatgtcagagccattttttgcaagttgatatgcagcatcaaagccactttcattacctccgataaccacatattgccccttattaaagttatcaaagtcttcaatctcactataatgaataccatatttaaatggctttttagggaaattataatcacctgttgcgataaagatataatccgcgtgatatgtctctgttgtcgttgcaatcgtataatatgcatcatctacagatatatttgtgacaactgtattttcaaagatattcagctcgtaatggttggcaaccacttgtaaatattcagcatatgtttctccggaaatatgttcttcattaaatgtaaatgctggtgaagtatccatggaaattgcattcatatcaggcatgccaaatccattagacgtaaatgatggcgtaatcgtacgggtcgatttcggccaatgtttaaatgaatgtcctactgttcctttttctaaaataatgacatctgttataccgaaatcttttaaggtaatggccatacctatacctgcagcaccggcaccgataatagccactttatgatgttgcatattaacactccctcaatgatctatttcaagttattgtttttgattataaatcgtaataattacgatttataaagtatagacctatccttgagaaatttcaatattaaaagaaaaacttccgttattgtagagaattcatctacatttcggaagttggtatgtgtcttttttattaaatttaaagatgctacggttagttcaaatgattgcgatagacattcaatggttgtcatccagcctcagtacttggagataacattttggcggtgagacagaaatcatattttcacaaaatttatttcgtcgtcccaccccaataaagaaaaagtatttctttattgttgtgtaacttctccacgttgtatttcactatccaaattttgtttcatattatcaaacaactcttgaaatctaacctcatcttgatcagaataacctttaaaaataactgaatctatattttcctcgttaaaataataaatttcatcttccacaacaccaatcggatatttacatgcagaatagtcaaacatatacttttgattttcaatttctacaattggtcctctattaataatcattaacttttgcgaaccttcttttaaataaataatgcttcctattgtttccatttattttcctcctttgtcaccatctcgatttcgatattccttcgcatttctaaatcaatcatctcttcttccgctttacgaatgccatgttgaatttgttgttgctgctcgtataacgcttccgttgaacgtcgtttcgcaaaatgaaattcatcgcggaactgttccatacgactagccatattgctactataataacgctcacttaaatgttgatataattgttctatcgaatgattaagcgcatcactttcatctatcaatgctttaacctcttgcttttcatcatataagtcatccatttgcttatgtttcgctgtaatcattttattgattccatcaagtttattcgacatcatttcaccacgttttaatttttaccaatttcattaccaatcattacgtcagtttggtcaaattcttcgccaactttttgtatattatcgctcgcagttcgtattgcttcagcaacagattgattcttactaatcaaatcatctatcacactatgagcattattatttccacttactgttgtactttcatctttttccggtttcgacacattattacatgtttcaacagcgcttttaatagatgatgatgcactattggtcttaaaaatatcactttgaactgtactcatcatttacacctcttcccatttaaattattttaaaattattagaaactgtatcaatatatgatattcaaacattcaattatacttaaatattgttttgtgattatattcaaaattattgtatcaataaatatgtatcattcctagaattttattgaacaaaaagttagaaaataacttttattgcaactcaaccttgttttgcattatagaaattaacaatagagattaaaattttattttccaacaataaaaaagcacaaatatttttattgaggcagctgtatctcttctcttcataaaaatatctgtgcatattatttattatcttaatctaacgtaataactaacctgttgtatcttgtaaaatcttatccatagagtgcgcaacactatcacggtacatctccccaaatttcaataaatgcaccatcaataaatataaacgataaaattcaagtctataggatgcaccttttgcgagtggataatgtttattatacgcatcataaaattcgctagtaaaaccaccaaataccgttgtaataccgatatcaaattctctgtcaccatataatggtgctggatcaaataacgccgggcgtccatcttttaaaaacatataattaccgccccataaatcaccatgtaataaagacggtttactttgatgcttttctaattccgccacaatttgacttcgcactttgtcatatactttgatatcgttggcatcccatagccctctatttagcaacgcttctttcaaatgatccaagcgtttatcgacaaaaatggtacgccaatcgtcttgccaatgattatcaaatgaaatatcgccaccttcataaggtaatgagaagccaaatttgccttcttcttgttgctgactgtgtaattgagctacgagttgccctaattgacgttgactccctgaagctccttcttctaaatacgtcatcactaaatacgcatcaccgttaacttcgccacttgcaatcactctaggtgccgtgatacctgcacgctcaaattcatttaaacctgcaatttctgcagcataaaatgattctttacgcccacgttgaacaagtaagaaaaatgtatccgtgtctgtttcgactcgatatgcttcgtttacatcaccaccactcactggtgaaatctctttaatatcttttaaaggtaaatgctctaaccattgttcattcatacaaacaccttccaatctacttactttatactataacattgcctaattaggatgatttaatcttaaaaacgttattcaaacttgcgtcaattttcaaaactttttagttttaactaggaaattatgtagggaaatgctagtctattaaaagaatatatttcacatatattaagttgaggatagtaagcctcaaatataatgaaataggagcatactcatgtacaaattaattaaacctttcttattcaaaatcgaacccgaaaaagcacacggactaactatcgatgcattaaaaacgttacaaaagtttccggttttattcccagtcgtcgataaactatttacttataagaatccaacgttatcacaaacgatacaaggtaatacgtacgacaatccaattggtttagctgctggtttcgacaaatcttgcgaagtgccaaaagcattggaacaccttggattcggtgctttagaattaggtggtatcacccctaaacctcaaccgggtaaccctcaaccacgcatgtttagattattagaagatgatgccttgataaatcgaatgggcttcaataatattggtatgaacaaagcactaagtcatttgcgtaaaaatgcttatcaagtacctgttggtatcaatgttggtgtgaataaaatgacaccttatgaagcgcgttatcaagattatataaaggttattgatacgtttaaacacgacgtttcatttttcacagtcaacatcagttctccaaatactgaaaatcttcaaaacttccatgataaagatgaattttcaatgttatgccaagctttaacaacatttaaaaaacaacatgatgtaacagtgccaatttatttaaagctgacgtctgatatggacttcgatggcttaaaagcactattaccggcgattactgaaacatttgacggtatcatcttagcaaacacaacgcgacaacgagatggtttatcttctgctaataaagtcgaagaaggcggtttgagtggtcgtccattatttgaacgtaatttaagattaattaagtatgcttatcagcaaacaaatggtgaatttttaattataggtacaggcggcgtattcagtactgaagatgcaatcaaaatgatgcgtcacggtgcgtcacttattcaaatttattcatcacttgttattgaagggccaggtttaactaagaaaatgaacaaaggcatcgcacgttacttaaaagatcatcattttgacaatgttagtgacattattgggctagatgcttaacccaacgtagtcaaatgatgctttaaaacttgctgaatcgtcttattaaaattatgatataactcaagaagatatatttatcaccattttttaaaataatggcttaaatatcatatatcattaaatatagcgttttataacggaggcgtttgttatggctaaagaaacagataataaaaaaacagtagcgacttctgacaacaaagacaaacagcaacaaaatcaaactgaagaagatgaacgtcaaggtttaaatggttatcgtaaaacagatcttgatttagaaattgagcaagagctacgtgaaatgatgaaaacaggtgaaaatgaaacgaaaaacgactacaaaaagtttaaagttttttctcttatttcaacacttgtcattgtcattttagcaattatacgatttgttcataaaatgatgtaattagagtgagacattgttttatgtctcaggatccagttattcattatagctacaatatttacgattatataaataacccgagattttagtatgattcatttcactaaagtctcgggtttctatttgataatttttaatagggcatggcttgaatatgcgcctgccttttatctcatttccaatgattaatctggatattgttctaaaaatgctttcgcttctttattaactgttttaaaatcaataccttgttgcatcgctgcaaagacacatccacaataacactgtctaaagatattatagtcattacacatttctatggaacgctcataacctttacttttcttaaaatcacttggcaaatagttcacatcatatattttttggacatccataccaagttcattgattaattgtgcgttctttttaggtgataacgtgattgcactgccaaaataatcatagccatgttctacagctgctttcgctacaatatctaaacgcatttcaaaacaagcggtacaacgtaagccgccttctttttcatcagctaattctttatccttcaccattttcacaaacttatgcggttcataaggtgcttcaatatacttcacattcgcaccagtcttgcgattaaaatcttccacaaattgttcttgcactttagcacgtcgtaaatattcatttttcggatgaatatttgaattcgcgaaataaattgcaatgtctgcatattgtgttaaaaactctaatgtatatgtactacaaggtgcacaacaactatgtaataaaattttaggtctgattgcttctctttcccactgcccgattaatttcttcaataccttgtcataattaattttttgatttttcattttactgataataggttcagcattaatcatgatttaacctcccacatttaatcattaacttctattatatatgattcatattaaatgtcagtcaaaaaagttagaaattcattttaatgcatttatatttcgaaaatcccttatgtatctaaaagcattttttaaacttgaattttaaaacactaaacaacacatacgtctctgtgtcattttcattttttgtatgtcatatatatgtttacttcatttaaatcaatttcatcttacaatttatcgtgtattttacaaaagattgacttcaattcatcgtaaaagttatacttttgccattttttaatgtaatatggtgttagtaataaaaataatacattgaggtgttttacatgacagcattattcccttatatcgcttttgaaaattcaaaagaagcccttgcatattacgaagaagtatttggtgcaactgacgttaaacgtttagaagttggcgaagaacaagcgtcacattttggtatgactaaggaagaagcacaagaagcaactatgcatgctgagtttgaagtgcttggcgtaaaagtgctatgttctgattcttttggtcgcgctgacaaaattaataatggcatatcattattaattgattatgatgttaacaataaggaagatgctgataaagttgaagcattctatgagcaaattaaagatcattcttcaattgaaatagaattaccgtttgctgaccaattctggggtggcaaaatgggcatctttaccgataaatacggtgttcgttggatgttacatggtcaagactatactgcaatccaacaataatgttattgataaagatatcatttaataagcttatgttatttagcaaggcaagccactcttgattcatggtttgccttattttattgtatatttttaattatcgttgctggcccttgattgacaatcgtattaaaatgccttattaagtcaactttgtctatacggtttggatcttctacccaatgtcttatcaaagacaatcccgcacctgaaacataactcatgaaataggaaaatggtataccattaatttgatcattttcatttttataacgttgcaaatgacacataattaaatcataaagtttttcgtggatatttgaatctttacccatacgaaacatcaattgataaaatacgatgtctttttctatcatttctattaaaacggtcataatttgatgtatgttatccgtggataacttaactgctccatttaacttctcatcatgaatgaagtctcttatttcctccaactgctggtcctctaatttttcaagcaaatcatatttatcataataatgcgtataaaatgtactacggttcacatcagctaaatctgcaatttgttgtacagtaatctcttctaattggtgttgatgtaaaagttcaataaatgcatttctcattgcaacttgtgattttctaatacgtcgatctatagtcatttatatcaagtcctccccaatgattataaacaattataaacgttatgttcattatcctacaaacctccaacattgatgattggcacacaatgtttacctgtttaatataggtgatacaaacaaacagaaaaaggtgataacaatgaaccaacatttactaggaaatccaaaattaactgtaactcatgtcaatgaagtgaaagccggtattaaccacatcgttgtcgacagtgttcaatatggaaatcaagaaatgattatggaaaaagatgtcactgtggaaatgcgcgatggcgaaaaattatatattaatattttcagaccaaataaagatggcaaattccctgtagttatgtctgcagatacttacggtaaagataataagcctaaaatcaccaatatgggtgccctttggccaacattaggcgccattccgacatctagttttacacctgaagaatcaccagacccaggattttgggtgccaaatgattatgttgtagttaaagttgcattacgcggtagtgacaaatccaaaggcgtcttatctccatggtcaaaaagagaagcggaagattattacgaagtgattgaatgggcagcaaaacagccatggagtaatggaaatatcggaacaaatggtgtttcttatcttgcggtgactcaatggtgggtcgcatcattaaatccaccacatttaaaagcaatgattccttgggaaggattaaatgatatgtatagagaagtagcctttcacgggggtattcctgatactggcttttatcgtttctggatacaaggtatttttgcgagatggacagataatccaaatatcgaagacatgattcaagcacaacaagaacaccctttgttcgatgatttttggaaacagcgtcaagtgccattatcacaaattaaaacacctctactaacatgtgctagttggtctacacaaggtttgcacaaccgtggctcttttgaaggatttaaacaagctgcatctgaagaaaaatggctatatgtgcatggacgtaaagagtgggaaagttactacgctagagaaaatctcgaacgccaaaaatcattctttgatttttaccttaaagaagaaaataacgattggaaagatacgcctcatgtcatatatgaagttagagatcaattttataaaggcgaattcaaatcagcgtcagcgttccctttacctaacacagaatatacaccattgtttttgaatgctgaaaatcacacattgaatcatgcaaagattagtagcgcgcatgtcgcacaatatgactctgaagataaacgacaagatgtaagttttaaatatacgtttgacaaagatactgagttagttggaaacatgaacttaaaactatgggtaagcactaaagattcagacgatatggatttatttgcaggtattaaaaagttagatcgtcgtggtaatgaagttaacttccctgattttaatcatattgaaaatggtcaagtagctaccggttggttacgcgtatcacatcgtgaattagatcaagaaaaatccacaattgcgcaaccttggcataaacatgaaacagaattaaagttgtcacaagatgagattgtacctgttgaaatcgaattgttaccttcaggcacgctatttaaacaaggcgaaacattggaagttgttgtaaaaggtagtgaaattgtaattggtaatagtacccctggcatgaaaacgcgttatgaacatgaagaaaccgtaaataaaggcatgcacatgatttatactggtggtaaatatgattcacaattaatcattcctatcgttaattgatatacagcaattacggtcgattttgattaaaagtgacatagttataggactgtataacaagagaaggccacacgcttggaatcttaaaccaaggtgtggccctttttattattgatggctatttaattttataacactatcgtattttctttttcatgaatcatttcaataatgacattgtcttcattcattactgctactttaggtgcatggtgtttaatttcctcttcattcaactgtgcataagtcatgattatgactacatcgcctacttcaacaagtcttgatgctgcaccgtttaaacaaattttaccactacctctttcaccagctattacgtatgtttcaaaacgtgcaccattattattattcacgatggctactttttcatttggcaagatgtctaccgcttccaatatatctgaatcaatcgtaatgctacctacataatttaaatttgactcagtcactcttgctctatgaattttagcattcatcattgttcttatcactttattcagctccaattattatattatctattaaacgcgcttttgaaaatttgacagctaacgagataaatatgcgtccagttatttcgtgttgttctactaattgaggataactataaacagcaacttcttcaatgcatccacttatatgtgattcaagatattgagtaaccctgtctataattactttactttgacgttcaccgtcttgatacaacgcttgtgctaatagcaaacttttacttaaatgtaccgcttcttgtcgttcttgctccgttaaataaacatttcttgaacttttcgccaaaccatctgcttctcgaacgatatcaataccaataatttcaacggcatgattgaagtcttttaccatttgcttgacaatagccaattgctgggcatcttttttaccaaaataagcataatccggcataacaatattaaatagcttattaactactgttaccaccccatcaaaatgccctggacgcttcgctccttctaacacatcagctaatggacctactttgacatcaatacctaattcacctggatacatatcttctactgcaggatgaaaaacaatgtccgctcctacttctgatactaattctaaatctttatcaatttgtctcggataagcatcgaaatcttcgtttggaccaaattgtaatggattaacaaatacactcacaattgtaatatcatttgtactaactgattcgcgtaccatcgttaaatgtccatcatgtaaggcacccattgttgggataaaaccaatcgttgtgcctgagcgtttggctgctttaacaatgtgttgcatctcttttaccgtagtaatcagcttagtcattgttattaacctcattcataattttctttttatacgtatattcttctgatggaaatgcaccagatttaacttcttgatcgtattgttttaaaccatctacaccaacactaaaatcagcaaattgcttcacaaatttcgctttatgttcaacaccataatttaacatatcgtgataaaccaatacttgaccatctgtaccttttcctgcaccaataccaatgactggaattgttaaatgcttgctaatttcttctgctaaatcatttggaattgcttcaagtactaacgcaactgcaccagcttgttctacatttttcgcatctaaaataagttgctcagctgcttctttcgttgcaccttgtaatttatatcccataacgccaacactttgaggtgttaatcctaaatgtgcaacaacaggaataccaattgccgttgctttttcaataaatggtgtaatatgcgctccttctgctttaattgcatttgcattcgtctcctgataaagctttagagcatgatttaagtcttgtgtcatagagatgcctactgcaccaatcggcatatcaacaactacaaatgtatttggtgcgcctcttcttactgcacgaccgtgatgaatcatatctgctaacgtcacttgtacggtactttcataacctaatacagtcataccaagtgaatccccaacaagaatcatatcaatacccgctgcttccacttgtttagcacttggaaaatcataagctgttaccatagaaattttagtttgcttttgtttcatatctattaattgacttactgttttcaatgttattcaacctctttttgcagtattattagaaatagtataatgaatcttttatagaaaggaaagaagaagatgttatcagttgcgattatcggcccaggcgctgtcggtacaactattgcctatgaattacaacaatcattgcctcatacaacgcttatcgggagacacgccaaaacaataacatattatactgtaccacatgaacctgcacaagatattgttgtgaaaggttatgaagatgtcacaaacacatttgatgttattattattgcagtcaaaacacatcaacttgatgcagttattcctcatttaactcatcttgcacatgaggacacgctcatcattttagcccaaaatggttatggtcaactcgaacatattccatttaaaaacgtatgccaagcagttgtctatataagtggtcaaaagaaaggcgatgttgttacgcacttcagagattatcaattacgtatacaagataatgcattaactcgacaattcagagatttggtccaagaaagtcaaatcgacattgtattagaagcaaatattcaacaagctatttggtataaattgttagttaacttgggcattaattctatcacagcactcggtagacagacagttgcaatcatgcataatcctgaaatacgtacactgtgtagacagctattactagatggttgtcgtgttgcacaggcagaggggttaaacttttcagaacaaactgtcgatactattatgactatatatcaaggttatcccgatgaaatgggaacgagcatgtattacgacattgtgcatcagcaacctcttgaagtcgaagcgattcaaggctttatttatcgacgtgcacgtgaacacaatcttgacaccccatatcttgatactatttatagctttttacgcgcgtatcaacaaaatatgtaagcacatatataatataaaaagaccttaacgatgcatttagaaccacctgttcctaatatcgctaaggtcttttaattatattagactattcagcttctctaatttcttctgccacatctttatagtctattttcgctttaacaaacgtctcgttatttaccgggaaatgttgttggaatgtttcaaagttttgtatctcaacgacaacgtcatccacttcaaagtcaagaacatgtccaccataagctctttcatcatccgcaaaatgtatatgaaaaccagcagaccctacgccatgaaataattctggtgtaaaaaatccaacaatggcaccacgaatatcttgtcttttttcctcaggttgtctgcgtgctgaatcaatcaaacgtgtatatggcggttgctgagcaggcatcattcgtacatgcatatgtttaaatgtgccataaattttaacagccgaaaataaattctcacttaacatttcatttttaatttttgcgaatacatcatcttgtgataattgttgcaatggaaatgtcttactcgctttaaaattagtaatcgatgcatacggtactttctcatcaccttttaattctataaattctttatgctcgttagcatgatatgccttcccgtctaaaaatattacttcgccatcagaccctgttaacgttgcaatccctaaatttccatgttctaacaattcattaattgtagctgttccttctagtaagccagccattaacgtacctaatgtaccatgttgatacaagacattcgtcattccaaaaccatctccctatagttattcctcgttgtcatgctctacttcgtgcttaatgcagaactactttcctttatactcaatgacacctcgacatttctattcatgtcactaaattttcacgagtcataatactttattcaattattattttacgcaaaagtattgcctctatcaatgcttgctaaaaaatggacctatcagtgccacatgttactgcaacactaatagatcctcttaccattaatatatttctaattaatacttaaaataggcttagtcttctaataaatatttaattgaatcaaatgtatcttctaatgttttaacagatttatcgaacaatgcttgttcttctgcacttaatggcatttcataaattttaactgcgccatgttggttaactaatgttggtacacctaggtaaacgcctttgtgaccaccatattgaccatctaattgtatagaaacatttaagacattattttcattatttaaaatggcttttgaaatgcgcatcaatgctaatgcaataccatagtatgttgaccctttagcttggataatttcataagcagcgtcacgtgtatttacataaatttcttccgctttagcttcgctaccagtttgttcttttaatgtgtcatatactgaaatacctgctacatttgcttgtgaccaaactgcaagttcagtatcaccatgctcaccaataatactagcgtcaacacttgaaggtgcaacaccaagttcttggctaattaaatattgtaaacgtgcactgtccaatacagtacctgaaccgataacacgctctgctggcaatccagtatattcttttacaaatcttgttaaaatgtctacagggtttgccgcgattaagaaatatccatcaaagccgctatccattacactcttaacaatgctcttcataatcttagtatttttttcaactaattgtaaacgtgtttcacctggcttttgaggtgcaccagctgtaataacaactaaatctgcatctttacagtcttcgtattcacctgctttcacatcaactggtgaaggactgtggactgtaccatggtttaaatcttgaacatctgcttttactttgtcttttgcaatgtcaataattacaaattcatcagcaacaccttgcgtaaccattgcaaaggcatagcttgatcctacagatccatctccgattaatacaacctttttaccaaatgttttcataattatgtctcctaacctaattgaatttattttacacgtgactacacgtaaaaatatctatactgaaattaaagattaacaattttattttattataatattatgctaccaaattacaaacataaaactgagatgtaagcggagtcaaattacactctaacgcccataaatattgatatctcaagctttagcacgtaatttgaaatttgtgacaatttttagcattctaaaattgcgtaatgacgctatttaaaggctttaacaaactattgagctttctatttttttcattttaaaaaggatggctattcgacttaaatgacttactatataacctcctattttccaccttaccctcatcatatttgatgcatctttttatagtcaaagaattacatttcatacaaactagccaatcagacataaacatgaaattaattttaaaaatataatgcgcaaaattgttagaaaattagcaaaaaatagtacttattcatttaatatctgttataatcagttttatcatttaaaaaatctatggatgttatcaagacaagtcattaataagtaacataaagttgtgatttttcagaatttttagacaaaatattgattatttgtgctatgatataacatattaaaaaacaccgtatagaattgtttatgaatgtttgggaggaaagtttatgggaagttttttcaataaaatagcacgaaaagaagatccggctatctatcaaaataaagatggtcatttaaagcgtacacttcgggtgcgtgatttcttagctttaggtgtaggaacaattgtatcgacatctatctttacgctacctggcattgttgctgcagaacatgcaggaccggccgttgcgttatcattcttactcgctgctattgttgctggtttagttgcatttacttatgcagaaatggctgccgctatgccatttgcaggttcagcctattcttgggtcaatgtattatttggtgaattttttggatgggttgccggttgggctttattagctgaatattttatcgccgtagcctttgttgcatcaggattctcagcgaatttacgcggacttgtgaaaccaattggcatcgaattacctgcagcattatcaaatccatttggtacgaatggcggttttatcgatattattgctgctatcgttattttattaactgcattattactatcacgtggtatgtcagaagcagcacgtatggaaaatattttagttattttaaaagtattagctattattttatttgtaatcgtaggtttaacagcaataaatgttagtaactatgtgccatttattccagaacacaaagtaactgctacaggtgactttggtggatggcaaggcatatatgctggtgtttcaatgattttcttagcgtatatcggtttcgattctatcgcagcaaactcagcagaagcacttgaccctcaaaagacaatgcctagaggtattcttggttctttaagtattgctatcgtattatttattgctgtagcacttgtgttagttggtatgttccattactcacaatacgcaaacaatgctgaacctgttggttgggctttacgtcaaagtggtcatggtgttgtagcagctattgttcaagctatctctgttatcggtatgtttacagcattaattggtatgatgttagcaggctcacgtttactttattcatttggacgtgacggcttattaccttcatggttaagccacttaaacgacaaacatttacctaatcgtgcactagttatacttactattattggtgttttaattggttctatgttcccattcgcatttttagcacaattaatttcagccggtacacttgttgcatttatgttcgtttcattagcaatgtatcgtttgagaaagcgtgaaggtaaagatttaccaattcctgcgtttaaattacctttatatcctgtgttaccagcagttacatttgttttagtattgctagtattctggggattaggattcgaagcgaaattatacactttaatttggtttattgttggtatcattctatatttaagttatggacttagacattctaagaaaaataacgtagctgaataccacccaccaaaataaaaattaaaaaaatcatttcccatctgattaacatccagatgtggaaatgattttttattttatattaagataatcgctattaccaaccttgtccagatatgtcatattgatctaagttacctgcttccaaagcagtcagtgcatcttctatagtgtttaacgccgtgtctaattgctcatatgttatcaccaatggcggttggaatcgcaacacatttcctgctacagctataataactacgccatgctcaaagcagtaattacaaattttaagtgccgcactggcatcacgtgttttgagttttttgtcggaaacaatatcaataccaatgctcagacctttacctctaacatcgcctacactattgtatttagatacccattgattcattcgtttcctaacatattcccctttttccgcactagcctgaagaagcgattgatcttcaatcatttgaattgtggctaatgcagcttcacaactaactggattagcacctgttgtaaataaatgtgctggtgcttctaaacaattcataatctctttgcgtccaacaattgctgacatgggcataccacctgctaaagattttccgaaagtgattaaatcaggcgtaaaattaaaatgcgagactgaactccatgtacctgttcgcccaaaaccttgttgaatatcatcgacagcgattaaaataccatgttcacgacaaatcttttctaacgcttcaaaataccctggaactggttctaaaagtccaccatcgccttgtatcgtttcaataacaatacatgctacttcgtcagcaggtacgtatttcgcaaacatttcttttaggggtgctaaatattcttctactgaattagcttgtggctgctcgtacataccacgatatttatctggaaacggaatatgataaaaaccattcaataacggaccataatgtttgcgcatatttaaactaatagctgacatagacaacgagccaaaagttgaaccatgatatgcattagtgaaactaatgatataaggacgccctgtatatgctctggcaaatttaatgatgccatcatttgcgtctgatccggttaatccgaaggtcactcttttttcaaaatctccaggtgcaatctcacaaagcttcttagctaaacgtaccaatgattcgtgatacatatatgctggtgtataatgaataaatttatcaacttgtgcctttatcgcttctgttacttctctaggtgcatgacctacgttttgagaactcgcactcgataacaaatcgatatatgtcttcccctcaatatcaaccaatgttgctccatatccatgatcaataactaacggataatatttaatacgtcctgatttcgcaaaataatgttcatcctcttgaattaattgatgtgctttactcatatacattcccctcccattgacagaccttattcgtataattaccttccctacatcgataaccacattcgatttgatatcacgtgaaaatactgtcatgtcattatgaatactatccaatatactaataaaattcagatttgtaaatatattctgataattaagaattttatatcaatctactttatttatgcgcataattttgttcgattagggaattgtttactatattccatttgactctgaggtgatatgaatgcgtttaaaggtattgttccatttcattgctgctattttcatatcattcatgttgctatggatgaccatgttgtttgacataataagcaatcaatcacatttaaaagctttgttattgaatttagattttctaattccttctgacaatacaccatatactctagaaataatatgtcacttactaattggtagcgtcatttattttggatttgtattgctgtttcatacttctaaaaggctttactatctatgttatatccctttagttttcttatttatagcattgtatccctttttagtatttattgcgcaacgtccaatttttcaatttagtgtgacagaattaatcggttggattattacacatattttctttatgtcattaatggcgttagtcatacctagaataaaataatatttttaattaaactgacaattatttttcacattttatacacttttcaaggtttatgacttgagaaatgttctcatttttatcatactggaggtgtattgaaaagttaaggagtggaaagtatgaataaagagcaattagaaaaaatgaaaaatggaaaaggctttattgccgcattagaccaaagtggtggtagtacaccaaaagcacttaaagaatatggtgtaaacgaagatcaatatagcaatgaagacgaaatgttccaacttgttcacgatatgcgtacacgtgtggtaacttcaccttcattctcaccagataaaattttgggtgctattcttttcgaacaaacaatggatcgcgaagtagaaggcaaatacactgcagattacttagctgataaaggtgttgttccgttcttaaaagtagacaaaggtcttgctgaagagcaaaatggtgttcaattaatgaaaccaatcgacaacttagacagcttattagatcgtgcaaacgagcgtcacatttttggtacaaaaatgcgttctaatatcttagaattaaatgaacaaggtatcaaagacgttgttgaacaacaatttgaagtcgctaaacaaattattgctaaagggttagtgccaattatcgaaccagaagttaatattaacgcaaaagataaagctgaaattgaaaaagtattaaaagctgaacttaaaaaaggtttagacagcttaaatgctgatcaattagttatgttaaaattaacaattcctactgaagctaacttatacaaagacttagctgaacatccaaatgttgttcgtatcgttgtattatcaggtggttacagcagagaaaaagcgaacgaattacttaaagataacgctgaacttatcgcaagcttctcacgtgcattagctagtgatttaagagctggacaatctaaagaagaattcgataaagcattaggtgatgctgtagaatcaatctacgacgcatctgtaaacaaaaactaatttatacattaaacgtattttttgatataaactactaaaaaggactcatacatgtgctttaatggcattgtgtatgagtcttttttgattaaagttgattttgccgtatgtattagattacgtaaaaaaaatcggacagctgaaaaatctttaagatttctcagttgcccgattttaaatatagctattagaatttagttttcgtagtaacctaattctaagtcttttgaagtttgtttacggatttttctcattaatttttcgtcttcaattaatgattcaccgtatgatggaatcattttcttgattttaggtgcccattcagttttgtattcagggaagttacgttctaatacttctaacgcaactgaaactgaagttgaagcccctggtgattcacctaataatgcgattacagtgtggtcttgtgagttaaccacttctgtaccgaattggatgaatcctttaccgtgttcaggtgtatctttgataacttgtacacgtttaccagcagtgtataattgccaatcttcattacgtgcttctggatagaaagtacgtaagtggttcatacaaccttcttttgtcataatcacttgatcaaatgagtatttaattaaaggtaagtttttaactgctgctgctaataaagttgtaatgttgtatgttttaacagacttgaataaatctaagttagaaccatttttcaagaatttaggtccaacattagcaaatggtccaaataacaatgttctttggccgtcaatgtaacgcgtatctaaatgaggtacagtcattggtggtgtaccaggtggctctttaccataaactttggcatcgtgttgttcaataacttgtgggtttgtacaagctaagaattgaccactgatagggaatccacctaaatgtttactttcagggatacctgttttttgtaataatggaattgctccaccgccagcaccgatgaatacatagtcagttacttgtttgaatttctcaccagttaggcgatttttaacagtaacttcccattgaccatttgataattgttcaaaatcaacaacttcatggttaaattgcactgtagcatttggatgtgcttcaatgcttttagccattttacgtgttaattcaccgaagtttacatctgtaccttcgtcaattttacttgccgccatgataccagggttatcttcacggcctttcatcatcaatggaatccattttttcattacttcgatgtcttcagtatattcgatattatcgaacatagggaaagctttcatcgcttcgtaacgatcctttaagaatttaacattgtttttacctctaacataactgatgtgtggtaatggattgataaattctcttgggttctcgatgctaccgcttttcactaagtgaccccagaattgttttgaaatctcaaactcttcgttaatcactttcgctttttcgatgtcgatagaaccatcaggttgtaaaactgtgtagttcaactcacataatgctgcatgacccgtaccagcattatttctttcgtttgaactttcgattgcaggacgatccaagcgttcgtaaacgtggatattccagtctggctcaatttcttttaacattgaaccaaatgttgtgctaagtacaccggctccaattaaaacgatgtctttactattagacttagccattggtttcacctctccaaaaattgtaaatgtgtatcatcaatatgaaagttacataaaactgacatatttctttaaaatatcaacgccatagataacttcctgttttaattgatacgctgtaacaaaatactatagttagtgcttacatgtatatgttaaagcaagcagtggtaaatgtaaattataattattcattaactttgcaatatattaaatcttttattcatagaagataaatatcaaatcaatcataattatttgacaacaaatagctaacgattgttttaatctacatttggcttatagcattttaaacctatactctattttgatacaatataagtgtaaaatcaatcataaaaaggagattcaatgcctatgcatccaagaaaatcacttcaattacctttaatattgtaaattattttgaatcttgcacttataggcattgtgattatcgttttaacacatactgagtttcaacttaatgccggtgatagtaatgtttttttattaaactgggatattcgaggtttaacatcttatattttctcattcttaatactggttgcgcttgtttctaaactaattttaatatttataactagacgacaaagaacatcataaataaacaagcagtccagtgcgtatcatcataccttacgcattggactgctttgctatgtttattgattgctatctttttgttgttgccatttttctatttcagcatctcgtagttcaacacgacgaattttacctgagtttgtttttggtaagtcgtcaacgaattcaatctctcttggatatttatatggtgcaacttcatttttaacaaattgttgtagttctttaactagcgtatcatcacccgcagtatggtcctgtaaaataacgaatgctttaacaatatttcctcgtatatcatgaggttttgctactacagcacattctttaacggctggatgattcgttaacgcatcttcaacttcaaaaggcccaatcgtatagcctgaactaataataatgtcatctcgacgtccttcaaaccagaaataaccatcatcatctacatgagctaagtcaccagtgatgtagtatttacctgtttgcgctttcgccgtacgttctggctctttataatatcctttgaaaagtgctggcaaatcaagtggtactgcaatattccctttcgtattagcaggtacgctattcccctcatcatctactacagtgaccgaactacccggaatgcctttacccattgatccaatcctttgtggtgtatcttttaaaaagcctataagcaaggtactttcagtctggccatatccatctcttacagttaaattaaagtatttcttgaattgttcaactacttctcgatttagtggctcacctgcagaaacggcactatgtaaatgcgttaagtcataatcatttaagttctgtaatttagccatcatacgatattctgtcggtgtacaacataaaacattaatttgatatttttgaagcaattctaagtatgtctcagggctgaatcttccattaaatacaaaagcagttgcacctgaacctaatacagataagaaaggactccatacccatttttgccaacctggtgctgctgttgcccaaactaagtcatcttcattaatacataaccaatgttttggtgccatttgtaaatgtgcaaatccccatccatgacaatgtgtaacggctttaggattgccagttgtaccagatgtatatgacagaatcgccatatcatcacgcgtcgtatctgccatttctagtttgttacttgcgttttctttttcagcttcaagtgaaatccatccatctttttgaccggcaataacaaatttagttaacgcatcatattctttaattttttcaaattcaactgtgaatggctctagtgcaataacagcatttatttcaccgtgtgtgatacggtattgtaaatctttagttcttagcatttcagaacatggaatgattgcaacacctaattttaaagcagcaatatataattcatatgtcgcaatagatcgtggcatcataatgagtactttatcgcctttagataaaccgtgcgatgctaaaacattacctactttattagactgttcaatgagctgttggtatgtgactgatatatcttcgccttcagtattatgatataaaattgcctttttatctggtatgtggctatatttttcgatttccgaaataatgttatatttttcaggcgcgaatagagctgacttttgcataactaacttcctttcatacatccacttttcctgtgatgaacattgtaattttataaatgaattatatatatcatacgcctatctttacagaattttcaattaaatagggttaaataccaaagtcctcgacactacgctttgacatgacatagcattcaaggactttcaaatgattgagggttgatatctcgggctagagcatatcagctaattcaatacgaatattgtatgataattcacgattaattgtttttacatctgcacctttcgaagtgccacgatgcttgtgtgtatgcttgtactcagctgaattttgccaatgataaaatgcttgcctattttcccacagcgtaataatgatatagtgtctaccagctgttctaggtcttaaaaaccttaatgctttaaacccatcaacgttttgcaaatgcttattacgttgcaaaaatttttgctcgaatgtttcttcttgtccctcgttaatatataaatgatttaacacacataatgaatcatttgataaatcatttattgcttctagaacatcgtaatatgcagtgtcattatttttttgtattgtgagacaatcatccagttcttctattatataacttctatattcatcataaatgttcataataaatgccttcatttcatttatatttttggtcatattactttatatctattactaattcattcccgtatttattaattacaatcatagtttggcttctttttaaaagataagactttgtaaaaagtattaatatttcatacaaatgaggacaggagtcgcccactatttttgtgtcttcaatttcatgatcattatttaacattagtcatgaaaatagccgacaacttcatctgtgaaatcaccggccttgtattttagctaactttatttctgattttacgattttaattgatcatacagagaaagtgatctttttacaatttctaaaaactcatgatctatattggacatttgatgaaaataagacaaaatgttttctgttagcttctcttgttttgggaatgaatcatcttctttaatccaaatcgctaattcgcctaatggtgttttatcatctttaaatgtttgtatatattcgtaaaagctcatagtattccttctctcaatttacttatataaatcctaccacgaaagctttcaagaaaacacaattaaatgtctatttagtgaactttttaaggttgttcactcttttaatgtctgccaattaggtcaattaatcatcacaatgtacaattaactctactttcagttcatacactcacacaccgtttttgaacaacacattaacttctcatttagataaaacgcaaaaaagcctggcaccaatacaatagataccagactaagagtctactatataaatttatttagcgtatggttttacttcgattgcaccttcattttcatcatgaacaccatgcttataataatcaatatattgtggctctaaaggctttctgccgcgtataatgtctgctgctttttcagctaacattaaaacaggtgcgtgtatattgccatttgtcgtacgtggcatagctgatgcatcaactacacgtaaattttccataccatgaactttcattgttaacgggtcaacgactgccattggatctgaagcaggacccattttagcactacaagatgggtgtaatgctgtttcaccatctctacgaacccaatccagaatttcttcatctgtttgcacttctggtcctggtgaaatttctccaccattgaatggatccattgctttttgagataagatatttcttgctacacgaattgcttctacccattcttttttatcttcttctgttgataaataattaaagcggatacttggtttttcgaatggatctttagatttgattttcaagctaccacgagagtttgaatacattggtcctacgtgaacttgataaccatgtgcgaccgctgccttttgaccatcatatcttacagctattggtaagaaatggaacattaagttaggataatcaacttcgttatttgaacgtacaaatccgccaccttcaaaatgattagatgctgctgcacctgtacgtgtgaaaatccattgtaaaccaataaatggcatgcgcttgatatctaagcttggctgtaatgatacaggttccttacatttatgttgaatgtatacctctaagtgatcttcaaagttttcacccacaccaggtaaatgaacacgtggctcaatgccttttgattttaggaactctgaatcaccgataccagataattgtagtaattgtggcgtattgaatgccccaccagacaagatgacttcattagcattgatggtatgtagtttgccatttttcttatacgtaacaccagttgctcttctaccttcataatgaatttcagtcacaaaggcacgtgtttcaacggttaagtttttacgcttcatagctggatgtaaatatgctcttgaagctgacattcggcgaccacgatgtacttgactatcgaacggtccaaaaccttcttgtctaaatccattcacatcaggtgttttatgatagcctgcttcaacacctgcatcaaagaatgattggaataatggattggttgctggtcctcgctttaacttgattggaccatcatggcctctaaatttatcataaggcgctgcaccgtatgttttttctaattttttaaaatacggtaaacagtgcgcaaaatcccaagtttccataccttctggttctgcccagccttcatagtccattggattaccacgttgataaatcatgccattaatcgaacttgatccacctaaaactttacctcgggcatgtgctactttacgaccgcccatatgtggttcttcatctgttgaataaatccaatcgtaaaatttattgcctgaagggaacattaacgcagcaggcatttggataaataaatcccaaaaataatcactgcgacccgcttctaatactaagacttctttatctttatcttcactcagacgattacctagtacagaacctgcactgcctcctccaatgatgacataatcatatgatttatttttgttactcatcgttatgacctccaaagtttgttgtatttcaaagtgagtattgcatgaaatatttgttagtggctgattggttatcgttgaattgctaaacttagctaaccaaaacactcgattttccttttatgattgttactaaaagtcatgaaataatctatgattcattttgcgtttagtccaaattatcaatcaacatttcgccacttatacaaaacaaagtgagtgtcttgtgttcttacaatggcactcaccttatctaatttttatttgctaaaccaattcactaattgtggatttgtatttgttaaaatgtgttttgaaacaaggtactcttctaagccttctttgcctaattctctaccgatacctgattgtttgtatccaccccatggcgcttgtgcaaaatatgggtggaaatcattaatccacaccgttccaagtttcaacttgtttgcaacgcgttgtgcttttccaatatctttagaaaatacagcacctgctaaaccatatatagaatcattcgctaattgaatcgcttcttgttcagtttcaaagccttctacagtaacgacaggtccgaaaacctcttcttgtacaatacgcattgacgtatcacaatttgtaatgactgttggctcgaagaatagaccatcttttaaatcgtctctatctgggcgtttaccaccaacagcaattgttgcgccttctgctttagctacatccatataagattcgatcttattacgatgttctgttgaaatcactggtcccatttcagtatcagcatcaaaaccattacctaatttgatttttttcacacgctcaataagtgcttgctcaaatttttctttaatactgttttgtactaatattcttgatcctgctgaacaaacttgacctgcatggaaatatccaccatttaacgcttggtctaccgccaattcaaaatcagcatcatcaaagataatgtttggatttttaccgccaagttccaaggcaatattcgtaacattattggcagcatttttcataatatgcttaccagtctcaatgccacctgtaaatgatacaaggtcaacctctttatgacctgacattacgtcaccaacttcagaacctgcacctagaataagattaattgttcctttagggaaaccaacttcttccattaattcaaaaacacgtattgttgttaatggtgtaatttcacttggtttcataactagtgaacaacccgtagcaagcgctggcgcaattttccatgatgcttgtaataacggataattccaaggtgtaatttgtgtaactacacctactggttctttaacaattttgctttctgtatctggaattggtgaatcaatcatttcgccaccgtctttatctgctaatccagcaaaatacataaacacattatgaatatcatccatatctgcatatgattcttctaacgtttttccagtatctaatgtttctaatcgtgctaacgcttcgcgatgttctttgatcttgtccgcgatggcacgtacttttttacctcttgtttcagcagtttcttgcgaccattcaccagactcaaacgcacgtcttgcagctaagattgcacgttctgcatcttcttttgttccttcagaaactgtaaatattacttcttgattataaggattgataatatctcttgtatttttattcgcgctttcaacccactcaccatcaatatattgacgctgagataaatgttttaaaagttccattcaacaacctccgttaagtttgttaaatttttatttaacgaattttacaaaattatgttagcatagaaatgaaaaatgtgtcaatttacaaaacaactcaagaattaagttttgtaagttcgttagatttttatttaacgaaacatttaactttaatgctttaaatatttttaatgtctttttttagaaaaggttttataatgtattagtatttattttaacgtgaccaaaatgatgtacggaggtgcaatgatgactcgttctcagaacaaacagcaacaattagaacaagcaaaagatattgtaattaattcaattggacagacaatggatttgtatggcactaatagaagtgtaggaaacttatatggcactatggtgtttgaaggcagtatgacgcttgatgaaatgcgtcatcaattgcaaatgagcaaaccaagtatgagtgctggcgttaagaaattgcaggaatttgatattgttaaacaacaatttacgagaggaagccgcaaacaacattttatcgccgagaaagactttttcatctttttccgaaactttttcactaaaaaattccagcgtgaaattgacatcaatgtcgaagcagtaaaagatgctcaagctattatcaacccattacttgaaagcagtgatttaactgaagctgaaacacaagaggcacacaaaattaaagctcagcttgatcatacacatgtttattacgaatggttagaacagttaaccgaagcgattgaaagcggtgaaatttttaaatatttcccaattccagaacagccttctgattctaaaaattaaaattgactcaaacaacaacaatgatgataatgcaagatgaaaacaatgcaataggtgcacgaaataaacggtaacttctatctctacaaatagaaattaccgtttttgttttatatgacaatcaatcatggagttataaaattcaaaatcttatgctcatttattgaattataaattatcgtcttgttcttcttctgatacttgaacgattcgcaatgaacgacgttcaacttcttttaatttttcagcacgcgtttcaagtttaattctatcgcgtcctaaaatgattaaaaatgatatcatcatgaaaataaaaataacaattaatggcacacttgccagtattgaagcagttttcaatacttctaatgcacgttcgccaccaactagcatcaatgaaaatggcaataagcacaatgcaaatgcccagaataaacgattggcacgtaatggttcgcctaccacttttttctgagatgctgccgctaaaatatatgaacccgaatcaaatgttgttgctaagaataagaaagcagatactaagaatagtacaatcatcaatgatgggaatggtaaatgatgcaccacttcaataatggttgcctctgtaccatgtgtatttaaatattgtgttacattaaactgtccagaaatttgtaaatacacagcatagttaccaaaaataccaaagaataatacgcatccaagcgttccataaataattgttcctagcacgacttctttaaggcgtcgaccttttgaaattctagcgataaataaaccgataaatggcgcatatactaaccaccatgaccagtagaatattgtccagtcttgtgggaaattcgtttcttttcgacctttaataccaccgaatggttctaaccatgttgccatatggaaaaaatctctcaacatatttccgaaccctgtcactgtcgtttccataataaaaacagtcggtccaataataaatataaaggctaaaagtacaaatgatagccaaacgttgatatcacttaacttttgaataccttttttcaatcctgtatatgaactgatggcaaatataacagtgattgttaataaaatggccgaacgtaaaatcatatttttaccatctaaaccagttaatctttctatgcctgcagaaattaatggtacacctaacgctagtgatgttgccgcaccacctagcaatccaaagataaataagatatctacaactttacctacaaatttatctgtttgaccttttaaaatcggacgacaagcttgactaattttatacaccggttgttttttaacaaatactaaataaccaattggtaatgctggtaaaacataaatagcccaagcaattggtccccagtggaacataccatactgcgtcgcatattggagtgcttcatcactcatacttttcgcgccatttggtggaacttgatagtaaaaagcccattcaataacgccccagtataaaatatcagagcctatgcctgcacaaaacagcattgccgcccatgtaaatgtattaaattctggtttatcacttgctttaccaagtgtgacattaccatatttaccaaatgcgatatacattacaaagcaaaaaatcgccagccccataaataaatatatcgaaccaattgaatcagaaatggcactattaataccagtgatgatatcttcacttgcttttggaaaagccatcataggtataactgcaaaaagaagtacagctactgtccctataaaggtcgtccagtccataactttctcttttttcaattgtgctccccctaattattaattttatgaatcctgtttcgatttatctcaaaatgtaataattatattgattcacaaaattgacaataactaatatttaataataatgcaaatttcatacaatttgaaacttggcaattattgaatatttatataatttttctcataataaacaaaactttaatagcgctaaaacaactgtgttaagttatgatttaacgaatttaacaaattttactagaacggcatttaagaatatttatacattattaacgaatatttatttattgtaaaacgctaccaaaaagttagacttccttcccactaaaataccacttttctctttcaacttttttaaaaaacggatatgcaacttttaatattggtatcaaaatgattgttagttcatattctatcaatatatttttctaaagaattgcttttattaactttcaattatgtacctaacctaaaaaaagccaaggcaacggatgttaccttgacttctaatacatattcaactaacaatatattcaatcatacgcgcattcgagagtgattgttgtacatctataatgcgttgatttaaagaacctttatatggtaaatcaggtttgaataagtgttgtataaatagcccatctactaaaacgtcaatgtatgataataactctcgacgttctgtacaatcatttgctaaatattcatataaaaatccagtccatacccaaattgtctttgtatttccaaaacgtgctcgaaatgctttaacaagatttaatgtaatatccaaattacaaaatggttcgccacctagtagacttagcccagatatataatcatgatcgcaatcatctaatatttctgctaatatttcatcagtgtatttctcgccatatctgaacttttgtgaggctttgttgtaacatccaacacaattaaatggacatcctgatacataaacactgcatcttactccttcaccgtcaacaaagctatttgattctattttagcaatataaccttgtccttgtttaatgtctaaaagtgtcattctttaggcgctttcatatgttttactcgtgcgcaaatttctttatgacggcctttaattactggacgttgaactggatttcctaagtaaccacatgttcgtttaacgacatcaactgttttaggattatcattgctacagttcgggcatttaaatcctttttcagttgcttcaaaatctccatcgtaatcacattcataacaatgatcaatcggaatatttgtacctaagtaaccaactttgtcataagagtagtcccataccgcttctagtgctttcaaattgtgttgcagtttcggatactcacaatagtgaatgaaaccaccactcgcataataaggataatctttttcaaaatctaacttttcaaaaggtgtaacatctttacgtacatcataatggaaagagttttggtaatatcctttatctgtaatgtctttaatatctccaaatctctcttgatctaaacgacaaaaacgatccgttagcgactcactcggcgtactataaatactgaaccaaatgtcatataattctgtccatttcgtttgataacgtttcatttctttaagaatttcaagcgtaaatgcttttgcttcttgagatgtttcccagtctggaccatagaaaacagtagctgtttcgtataacccaatatagcccattgaaatcgttgcacgtttatttttaaataactcagcaacatcatctgtttcttttaatttatagttaaaagcgccacttttatataaaattggtgcgttattcggtacagcatctttcaaacgatttatacgataaagtaatgcatcatgtaacacatcgatacgttcataaaagatttcccagaatttcgtcatattaccggcagattctaatgccattctaggtaaattaagtgtaacaacaccaagattacaacgaccattattttcaaaatgaccttccgcatctttccaacttggtaaaaatgagcgacaacccattggcgctttgaaatcacctaatatttctacgagtttgtcataatttaaaatatctggatacatacgtttcgttgaacactttaatgctaattgtttaatgtcatagttcggatcttgcggactaaagttggttccttttttaattgaaaatacaagttttgggaaaatcgctgtcgtgcggtcttttcctaagcctttgatacgagtatttaagatagcttgttgaattttgcgacttaaatgatctgtacctaagccgaatcctaatgttacaaaaggtgtctgtccattagatgtatataaggtattaatttcatattctagactttcaatcgcatcattgatgtctttagtgacttgttgatcaacataacgatcaatttcagattctttgacaaattgctttgcgatattcctatgttgttcttcattatgtcgtgcatatgtactaagtaattcgtcaacgcggtcaaccgtacagccaccatattgactgctagaaacattggctataatttgtacaagctgcgctgatgcagtttgtattgattttggtgaagttacattcgcgttgcctatttcaaatccattatgtagcatatttttagcatctattaaacaacagtttgttaacggttggaatggatgataatctaagtcgtgaaaatgtatgtcccctctttgatgtgcatctgcaacgtgctttggtaataaatgatttaatgcgtaagatttagaaacgatacctgctgttaaatctctcattgttgaaaatgtatcactatctttgttagcattttcgttaacaatagcaggatctttagaaatcaaacccgttaatgcttcttcgatttgattcattttaccccttcttcctatatattgtgtctactcattacgttataccactatatatagtattttcaaatttttattagtctgttaactaaaacgtcacaaagttattaacatttagtgaaattcatattttcacacaattatttcattaatttttaaaattgtttaaagattcgtccgtcatttcgacatgtttatgcaactattatttcattttgtaacgggaccatagtttctattttttcatacttaaatcgtcacaattcccatcaacattgcaattactaacataacgatggcgaatccccaaatccaaaagaatgcatacttaatatacgtgcccatgtttgcctctgctaaaccaattgccaaccataaggctggtgaaaacggactgacaaatgtacctataatattccctatgaccattgaataagcagttgatacagatggtacaccaaattgccctgctgtttgttcgacgatcggtaacacagcaaaataataagcgtctgtgctagttaataaatctaatggtacgccaagtaaacctacaataatatgcaagtatggtcctacttctgcaggaatcactttgattaaatttgtcgcaatcgctttaagcataccggtttcatttagtacacctaaaaacatacctgctgcaataatcactgcagccatcattaatgcattcggcgcatgcgctcttaatcgctccatttgttcatccactgatttaaaattaataacaagtgccaacgaaacacctatcatgaatgcaaattcaggtggcgcaatatttattaacatcgctagaataacagctaaagttaaagctgtattcacccattttatccatggtagtgttcgtgcacgtccttttacaggaaaccttacatcttgatctcgttcatatacttcaactaatttatgtacatctatatcttgtgtttgcggtaattcattgctagcaattgcttttttgatacgtttttgttctttaaatccaagatataccgcaaataacataacaagaatgaaacctattatttgaataggtattaatccataccataattcattgacacttttggcttttaacactgcagctacacgtgccattggacctccccaaggtaccatgttcataatcgccgcgcttaatgctaatagtagaatcaataaatatttattcatatttaacgctttatataaaggtaataatgcaggaatagaaagcaaaaatgttaccgcaccggcaccatctaattgggctattgtgccaattaaagctgtcattgcacagacaataacgacattgcctcgtgtcattaatattaagcgtttgacaagcggcttgaataaaccactatcgttcatgatgccaaagaaaataatggcaaagataaacataataacaacgttgatgacttgatctaaccctttagcaaaaaatccaaccaaatctgtcacactatatcctaaaatcattgcccctaagcaaggtatgattgtcatacctacaactggatttatctttttggcaatgagtaaacctacaattgaaataataataatgagccccattactgttaaccacatattatcactattcatattattttctccctccacttttaatacaatttacataatccccctctttaacttaaatataataattaatataattttttatatttaagttaactcattttatcaaaaatttcttttttgtgtaactatcaatagtgaagtttgattttcctacttgataacatggcatgactaatccttgtatatcctgtcctgtatttcattttgatttatcatttttattattgctttctattgcacaaaaaatctggctaaaggtcgctatgatagtaacgacttcaaccagatttcaatttatccatctattttattaagtttgttctacgtattttttctctattgtaatattcatatttataacgcatatcattatcgcttaaatccttcattattagactattcacaaagccacccatgtcttaatttcaatgattaagcgttaaagttaaaataagaagacttaccttagacggttagacgacccgctattattgtcttacatccaaccacgctaaaaattgagcttgtttgtcatgatttaaatattcttgtgacacaatttgtgacagtaactgttgcttttcgttatatgttatatctaataactttattttctgtcggcaagtatataaaaagtcgatatacgaactgtatgatggtggatataacgcctcaagctctgccataatcgattttgtcaacttaggacttgcgccatctgtagatacactgatagttagcttgtcgcggtgtagtgcacttggaaagacaacattgccatttgatgcatctccaacattattaaaaagggcatgctcaggtaaggcttgttttaccgcttcattgacacgtggctcattggttgctgcaataactagatacgcgtctacaatatcacttggttcaaattctttttccttccatatgacgacacctttatctaccatattttgaagtttttcagtgattgtcggactgatgaccgtcatatgttcaacgtattgacttaatgtttgtgcccgacgacttgcaactgtacccccacctactataaccacgttcttatttgttaaatctatcatcaatggcatattcatatcgcgctacatcctttatatctttttacgtcatttcaccttaaaacatttaacacattgaagcattaataaacatcgcgttgataacgttgttgctgtttcatttgacgcaatatcgtctcagcttcttcttgagaaatatgacgttcttttaccaatacatctttaatggcttgatggacatctttcgccatacatttttcatcgccacaaatatagattgctgcgccctgctcaatccattcattgaaacgttcactttcttccattatacgatgctgtacatattctttgtgttcttggtctcttgaaaatgctaaatctacgcgtgttaagtttccattttcaagccattcttctatttcttcttcatataaaaagtcagaactacggtgttgatcaccaaagaacaaccatgtttttccagtcataccaagttcttcacgttcttgtaaatatgctctaaaaggagcaataccagtacctggaccaatcataattaccggtatatcttgcttcatcggaaatttgaagttcggatttttcttcaaataaattggtactatatcgcctggtttaatacgctcagcaaaatgaactgagcatacaccttttctctcacgtccatgtgcttgataacgaaccgtaccaacggtaatatgcacttcatctggcgttgccataaaactactagaaatcgaatactctcttggtggtaattttctaaggatttgatacatattctcaggttgtaattctatagttggaaaatctgttattaaatctataaagtcccgatttataacatattcacgcgcccatgactcatcttgaatacgttcagataattcttcattgtcaaaatagatatctgcatttttcaataatggcaatgttaatttagtaaattcaaaatgtgatgttagtgcttcaacaataggaactgtatcaccatgatcattaattggcaccggagattgcggatcccaacctaacatggatattagtttttcaaccaattcagggtcgttttgcggtaatgctactatacaatctcctggttcatatgattcactaaaatcatcaagtaaaaattctatatgtcgtgtttctttatttgaatcggtaccatttaaattgatattcgctaaaacttctgcttggtatggatttgatttagaatatttcttttctttggcagacttaattgattcacttatcaccgattcactttgaataccttctgatgtggtatcaataatattaatgatgtctgccatccacttttctgcgtcttcttcataatcaatatcacaatctacacgcttacatatacgctcagcgcctagattttctagtaaagcatctacatctttaccggcttgacagaaaaattcatatgtttgatcacctaaagctagtactgaatatctcacatgatttaaattaggtgcgttatcgtcttctaaaaattcaaagaaatcccatgcattatcaggcggttctccttcaccatgagtagacgtaataataaataaatcttctaactgtgcgatgtttgtcgtatcatattcatccattgacatcaaaacaacttgatgtccgatatcacttaaacgttctgaaaaaatttcagctaaacgcatggcattacctgattcagaaccatatagcactgtaacatgccgctgattagcttcgatatgtggctctttattttgtaacatatacgttgttgaagttgcttgttcttctgatatttgtgattgttgccacacttctgtctctaattgttgttgattactatcacttgtcgtatcgttactattagctagtaaaaaaccactaagccactgttgttggctctctgttaatgtttgcagcagattgttaatctctgtgacttgtttttctgtaaatggactattagatgtatttaatttcaaatattttcacctcaataaacttgaaatagatgattgactcattttttatcgatagttcagtcaattttttaatatgtatggtataaattaaaacaaacttgagttgtgtctgatagttatacttacaaatatttacaaccttcatgttgcttgaatgacacagtaattcaaacaaaacgttgattatgtcgtgtcagttattaatgcatacagtcatgcatcgttgttattttttatttatttactatttattatgtaccaaatcagcctttcagtaaaataggtcaaattactgattttctaaatataaaatgcctcctaatgacatactattagtacatcattaagaggctcttgtgttatttgcatactaagcgctcaattttaaatttaagatgaagattcttgcaataatatttctatatttgccgatatatccaatggatcttccattggcaagaatcgatttacaacattgccttgtcgatcgattataaattttgtgaaattccattttattggggacccaaagattcctggttgttcattctttaaatgcgtaaataacggatgttcatcgttcccgttcacagatattttagctagcactggaaatgtaacaccaaatttctcacgactaattttcaagatttcttcattagaacctggttgtcgattgtcaaaattattattcggaaaactcaacactacaaacccacgatccttatatttttgaaacaaagtctctagttttttcaattgttcgctatatatacattctgttgcagtattaacaactaaaatcactttacctctaaatgcttctaatttataagttaagcctttataatcacttacttcgatatcatacacatttctattattcataagacacccctacacagccttttttatattgaatatgttctttttagaatgttctgataaaataagtgcgcgtttacaccgcgaatacacattatatagcgtgatacatttttcaaacacacgataaataatgttcgagtttatgttgttgctcaacctatacgatttaccgtcttttttcacctgtcttactttattaaaataatcacattgtatagctgtattagtccagctacaatatctttcgttataacccctcattataatcatccttattttctatttttaaaaagacaattagaccgctctttaaactatagattaatacttaagttaaactcatacatactgataccatacgttaaatctaacaatttaaaattcgttataactatggattaaagagctgcccaactcatttaatccttaaaaacttcacatgtgattgtttattaagccctcctttatcttattaaatatccttataacccttttaaaattaaactgacacactcatacattgttacacgcgacgataaacgtcatattattgcatatcattaaaacaagtcactttgtatcgtgtgcgaccgaatacatattaaatcatcaataatgattattcaattattaaaaataaaaacgaacattctatatagagtttccacttattgttttttcagcattgtcttcattacttaacattcgtatttgcaagtaatattgaccaccaatatttagacactttataagtatgccattcattatttttaatcatattatttttcatattgatatttctatacatatatttctgattgtatatttagatataatcatttgttattggaaaatatatgaaataaatttgactcatctttttcaatatccaaatgacacgatgtatgatttttgtaattaatttacttttaatttcctttaaaattagactgaattgtgacaattttcaaacattttaatgtgtaaatcatcggaaaatatatacgaattgcatttaaatcgtcaatttacatatatttttgcgtagtaatcaatcgttatcattgttatttatcgttacattacttcgagtatcagtatgtatttcgggcttcgtttgataacgacatttctttgtgacatcgcttcatcagtgtaactacaaatacaatgatttcgtgatgttagttacccattttatgtgttgcataaaatatgttgttataaaacattttaaatcattttatataaacaagctatatatttttgatatttcaaaaatataacttgtcatacaagtaaaaaaccgataagacattttatcttatcggttgaaatttgttattgttatttgtagtatttttaggttttctttttcatataatatatttcagtgaaaacacatgattgattgtgatttcactgaaacatgattaattgcgttgttgatgaataactttagcataaatgtaggaagttattttgtacatcgccatatatagaaacgaaattataatgacagctagtacgtaacttgttaaaaatatatgatggttattaatccctatcatatttagtaacgtataaacaatgttgctagaaattaatgtatgaatcagtgctactgttattggtattgcgaacaagaaagtcatttgatttcgtgttatctttgatattctcccattatctaaaccaagttttttcataatgtcataattgtgctgatttgcataggcttctgaaacttgcttatagtacatcattagaaatattccaatgacaagtacaattgataccacgccacctacaaatattagtccacctgtcagacgatcccaaaccattagcatttctgatttagaatttattgatgcatcgtactttttcgaaagcttttgaatttgtgatgttgttaatttcgtctttccagatacattaaagtttatcgatattgtcgaattcttttgttcatgtgcataaaatccttttactttttgtaattgatttttatctttaacaattaaaaccatactatcttgaatcatcatcaaatttaacgcatgtgcatcaagttgtttcactttaaagacttcattattaagaccgaccttagactgctttttaaaaataggtacattcgtaatcatacctatactttgattgtctaagtgtaatttgttttggtgatatcgattataatcttgcacagtaagtgctgtaatcattactgattgcttagaaaatatcgagccttcattaccaatgaagtctattggaatatcatcactagcctgttttaacttgtaataagcacgattcttttctaaagaagctctaaataatgtcgtttcatatactttaaagtcttttgcattaaccaaaccctgtatatcacgtttaatatgctcaatcgtttgttgacgttctatttgtgtcttagaattgtcgttaaatgacagatcataatcattggtaatcaatttcataatggtatgattcatatcgcgataggttgttaatgtcattgtgagcgttacaatcaaaaatgtacacagcaaagtgattgttgcaagactgactgcattcattttaagacgtacacgcatcccaactaccacaaaaaaataccgtggatgatagtaaacttttgatacctgctgcaatatactaataattatttcacttatacctacaaaaaatgtataagtaccgataataactaatcctatgacaatccatattttaaaaaaagcaccaaacgtcgtatcttgttgtaatgcaataaagtagcctaaatatagtgctgcgcttcctataacaattaaaacgtaacgcaaccatcgtgatatgacactggaatcggaacgatgttgataagttatcggtcgttgaaaattaatactgaacaagttgaatataagtagcatgcccattaatacagcaatgataatcaaagtaataaacatcgctacagaatcaaatggataataccttaacgtagcaacttcactgcccattattttctgtataaacaagaaaaatatcgcaccaagtaagtatccgccggcaatactaatgactgaaattatcataaattgtaagatagtttccatcactacaattaaacgcatacttttcttggtcatgcccaatgtcataaaaatactaaattcttttcgtctttgtgacatcataaagtgatttgcatagaaaataaaaataaaagttaaaagcgccataaaaaaattagctatgataataaatggtactaggaagtcattcttctgttttatgtagctatttaacccaattgatacaagcgtatattcaatcatgaatagtacacttaccgctaaaatgaatggaatgattacaagtcgctgcgtaataaattgacgtcgcactatgtgccataacaatcttaacttcatatattgacacttcctccattcacaagtgctaagctatctgttattcgttgttgaaaagctaattgactttcttcaccacgatatatttcatgatatagacgcccatctttaataaaaatgacacgctctgcataagacgcatcgatatttgaatgagttaccattaaaattgtctgttccaattgatgaatctcttgaaataacatcatcaatgcctttgatgtttttgaatccagtgcacctgtaggttcatcggctagtaaaatcgtcggtttagtaactaatgcacgtgcaatggcaatgcgttgcttctgaccccctgagatttcagaaggatatttgtttaaaaatccctctaaatgtaattgtactgtcaactgatgtaccctttgttctatatcttttcgtttagcaccagctaaaattaatggcatcattatattttctttattcgtcattgttggtaaaagattaaaatcttgaaaaacaaaacctaccatttgttgacgatacaatgctttacttttatttttcatattatttaaatgtgcgccatccacaataatgtcaccttcagttagtccatcaaaagaagcaattaaatttagtagtgtagacttccctgacccagactcacccataattgcaacaaattcaccagctccaactgataaattcatttgattaagtgctgtcgtagcattcaaacctttaccataaaccttttttacatgtttcacttctagcaacatggcatgcacctcatttctttgttagttctatattaaaacaaaaaatactaataacatttaaattagtgaaaaaatgttactagtatgcttacaatattgaaagtttttattcatctggaaattgaatcgtaaatgttgtaccctcattttgtttagatacgactgaaacaggatggtttgtgtgagttgaaatttgttttacgataaataaaccaatcccacttgagttactttgccgctggccattataacctgaatagcccttatcaaatattttaggcaagtccgcttcactaataccgataccattatcttttacgtataattgattggattgctcatcaaattcaatccatatatctttacctctcgcatacttaagtgcattatttattaattgttctatcattaaagaggtccatctaacgtcagttaatacttcgtgatgacaaggttcataatggatttttgttttttgatcaataaactgtattgaatatttcataataattgggcgaatgatattgttaatcgaaattttagtgacagaaatatcagaagtttcatttaataactttaaataactaagtgctaaacttgtatagttatcaatttgaataacctcttgacgaacacgattcacaacattaggctcatctctttcaagtaacagttgtgctgcagtaatgggtgttttcatttgatgtacccatgttaaaaagtagctctctacatcatttttatattcaatttgttcatttttaagctgatacaacgcattttctaagttttcaatttgttgttgttggcttatagtttttacaaaacttaaatatttaatacctataaatatgagtaataataataaaataacgccaagtgctagtaaatatgcttctaatggcaaatgatacaggtaaaacattaagccaaataaagcaaaaataactatgactattgctatttcctgagtaatacttttaagaaaggtcattgcattcaccctatactttatatccgacatttttctttgtaatgataaaatcattaacgccaatagtatttaattttttacgcaggcgagtcatgttaacagctaatgtgttatcatctatgaagttttctgattcccaacatttttcaattaaagcagttctacttacatatttatcttcattttgaaataataactttaatatttgtaattcagtcaaagatagctgtatgttttgttcttgatacacgacttttgcttcatctaatattaatgtacaacctttaaccgtcatcgaatcattagctactgacaagtcataagttcgtctcaataatgcttgaattttggcaatcgttaatgacaagttaaatggcttttcgataaaatcatctccccccatttgtattgccataatttggtccatattatcaatacgggaactaataaatataattggcacattagatgtttttcggatttcttgacaccaatgaaaaccatttaacgttggcaaattaatatctagcaatacaagctgaggttgatgttggttaaagatagacagtatatcatcaaattgttcaacgacaataacaccgtaattccatttttcaagttcagatgctaaactttctgctataacaaaatcatcttcaacaattaatattttcatctataatcttcttccttcaattgaattatcctttgtcatctttttgttctttagcctgctgcaatgacggctcttgatttgaacttcccgtgtcatttgtattttgatttagtgtatttgctttttctttctcgagttgctttttcttcgtacgtttacgctcttctaaaatagacaacactataaagaatatgattaataatggagataacattactagtatcatttttccacctcaaattatatttaattctatattttcacacgcttctattctaacgctttctataacaaattgtcatatatattcattttttgttattctaaatcactctgtttacatatttttaactaaaactacataattgctcaaaattcctcttttacactgaagacatagtcatatactcaggaggatgtcttatgttatcagttaaaaaagccacaaaatttgcagttgctaaccttattatcgtgtcaacagtttttagctctgtcacacctgcaattgcgcaatccgataaaagttctaaagatgaaagtttcgcggttggtaatactaaaaatccaaaaaatgttatctttttagttggcgatggtatgggtccatcatttaacacagcttatcgttattataaaaatgatccgcatgctaaagaaatgacccctactgcttttgattcatatttaaaaggcacaaatcgtacatattcaaatgacccaaaacagaatattactgattctgcagctggcggaacagcctttagttctggtcataagacatataatggtgccatcggtgttgacagtaacaagcagaaagtaaagacggtgcttgaacgtgcaaaagaaaaagggaagtcgactggtcttgtttcaacagctgaattaacagatgcaacaccagcagcatatgctgcacacgtgacttctagagatgataaaaacgaaatcgctaaacaattttataaagataaaatcaacggaaagcataaagttgatgttttattaggcggtggcgctaaatatttcggtaaaagtaatggcaatttagataaaaaattcaaaaaagatggttacgaccttgccacgaacagtaaggagttatcaaaatctgataaagataaagttcttggtttgtttgcagataaaaatatgccactagcaatagatgcttctaaagacgaaccatcattagctgatatgcaacaaagtgcaattagtaagcttgagcgtaataaaaaaggtttctttttaatggtcgaaggtgcttctatagataaatcagcgcattccaacgatattacaggcgttatgtctgaaatggaaggttttgaaaaagcattcgatgacgccattcaatatgctaagaaacataaagatactcttgtcattgcaacagcagatcactctactggtggtctaacaattggtaaagataaaggatacgaatggaatcctcaaccgattaaatcgatgaaacactctggatcatatatgacagaaaaaatggctaaaggtgaagaccctgaaaaagttattaatgaaggctatggctttaaattttcacaagatgatatgaaaaaggttaaaaaagagaataaaaagctaaaaagactacttaaaaaagaaaaagacgaaaaatccgcagatgtagaaaaacaaacaaaagccttacaacacgcaattcagaagccagtaaatgataaatcttatacagggtggacttccgatggacatacaggcgaggatgttaatacctacgcttatggacctagatcagaatcatttagtggtaatatcgaaaatacagaaagcgcaaaaataatatttgatatattcaagtaaagcataaaaaaattcccgagcactacaacaaggtgttcgggaatttttttatggtttaatttagtactcaatgttaggtgcttggttaacacgttcttggtattttttaaatgcgaagtataaaccgccaactaatgttaaaataactgctaattttttcatcattcaaactcctttctaagatgtgttgaaactgagttcaattaaattatatgtttttattatacactttttgacatattttttaaatttaagaatgcgaagatttttaacatttctgatgctagctttctttttcatctttcaaatgcttaataaaatcaaagccaggtcgccctttagccaatgcttccatcacatcataccaatccgaaccgacttgttgatatatattttgcaataattcatcttgcgccttgttcaattcagcaatgagttgatcgcctttatccgtcgaatataattttttgacacgtcgatcagtctctaaaactttttcaataatgagaccttgctcttttaatttttgaagtgttgcatgtgatccttgtttagaaatttctaatatttctagtaatgatttaatagtaataccaggtaatttattgataaaaaacaaaaaacgatgatgctgacggctcataccatacttctctataatttcatcagcggtagtaataaacgttttatatgcaaaataaaacaacatatgctcataatcgtttttattggtcgacatgatgatgactcctttcaaagcgttaacctcattataataaaatttataatgtaagtcatacaaatgatgataaaactataagctaaatctaagtttcacgagaaacattttgtgtatcagcaaattgcaccaatcatattaatacaaaattaatttaaacactcagaaatgttagtcgtgcgtaaatagtttgtatcactcactctgtgtatttaatgtaggcacatattttccaggaaataattaatcattcaccatccatgttatagcacgcttaatcgcttggtcccaatatgcataatcatgatctcctggcccatcttcaaattgataaggaacatttttgcgtgataaataatcgataaaatctaaattgtcttgatataaaaagtcttgtttaccacacataatgagcaattttggaatttgtttatcttcagctacagctttgtctagcaagtaatacggatcatgttcagttcctttaacacttgaaagattgccaattatggcctcttttgaaaaatcattccactctagatccattaaattttgcgcttcaaacacagcagataatggtacagctttggcaaatttatccccttgtgttaatgcaaatttaattgtgccatatcctcccatagagtgacctgctataaaattgtcatcacgctttttggaaagtggaaatatttgatgaacataatcatatacttccaaaatataatcataatagctatgaccatatgccatgttagcatacgcgctatgatccacattgggcataatcacagctaatttgtgttcattcgcatacctttctatgcttgtatatctcatatatgtcgtttcatcacttgataatccatgtaacaacattaaagtttttaatggtttagcagttgtatcgttattaaagaagctttgatcttccggtaaaatgactgtcaaattttgatgcataccaattgttggtgaatgatagtttaatgaaatataagccatacgtcatgacccctttctaattctactttatcaacattttacgcttaaacaattcactttaaaatcattttcaacaaaaaaaccgaatacaaatgtattcggcctaaaaaagtatttacgctttttctttatgatcttgcttgcgttttctaaacaatagtaatgatcctaataatgccatcattgcaccaaataaagttgcatttgtgttttcgctcttatctcctgtttctggtaaagcatcagtttggtgttgttttgatgccttattagaatggtttacttcacctttaggatttgatggtgctttctgttcattatttggtggtgtaactcttgaatcggagtcgctatctgagtccgaatcgctgtctgagtccgagtcgctgtctgaatccgaatcgctatctgaatctgaatcactgtctgattctgaatcgctgtctgaatctgagtcactatctgagtctgagtcactgtctgattctgaatcgctgtctgaatccgaatcgctatctgaatctgaatcactgtctgattctgaatcgctgtctgaatctgagtcactatctgagtctgagtcactgtctgattctgaatcgctatctgaatccgaatcgctgtctgagtccgagtcgttttctgaatctgagtcactatctgagtctgagtcgctgtctgaatccgagtcgctatctaaatctgagtcactgtctgattctgaatcgctatctgaatccgaatcgctgtctgaatccgagtcactctctgagtccgagtcactgtctaagtctgagtcactatctgagtctgagtcactgtctgaatccgagtcactgtctgaacctgagtcactgtctgagtctgagtcgctatctgagtccgaatcgctgtctgagtctgagtcactgtctgaatcgctatctgaatctgagtcactgtccgaatctgactcactgtctgagtttgagtcactatctgagtctgagtcactatctgaatctgagtcactatctgagtccgagtcactgtctgattctgagtcactctctgagtctgagtcactgtctgattctgaatcgctatctgaatccgagtcactgtctgagtccgaatcgctgtctgaatccgagtcactgtctgagcctgagtcactgtccgaatccgaatccggatctgggtctggacttggttctggatctggcgttggttccggttctggctctggacttggttctggatctggcgttggttccggttctggctctggacttggttctggatccggcgttggttccggttctggctctggacttggctctggatccggcgttggttccggttctggctctggacttggctctggatccggcgttggttccggttctggctctggacttggctctggatccggcgttggttccggttctggctctgggtcaactggtggtcccggtgttggatcaactggatttactgctgaatcaccatcagcacttccgcctccataacgtacaacattctcattattccaaccgaaaatactgtagtctttacctgtcgctgggtcaatattttcttgaataacctgtgttttcaagtttttaccagtattatcataatgaccttcaactaaaacgacatacgttttatttatatcaccaaaattaatacttgctacgtttggatgttcataaaaaattctattattaaactcaccagttacttctttaaggttagagtcatttgggtctgcatagtagctatctgataatttagatgtatcattcacttcaaaaattctcagttttgtatctgtagcacttactttaccgctactttcttcgattttatcttggtaacctttaatatacacccacgtattacctaaaactcgttgcttagggttaacaaagaccgtttgcttgtatgtgttttggcctgaagctgtatctacaccaataatttgagaagaaatgttcgcgccatttggcttatcaattcctgcaattggtgaactatagttataagtaattttattatcaaacatttcatccgcaatattaatatttgcatcatatgttcctgatttaggtgcctttgctcggtctgtaaataatggtaatgaaaattgtccgttaatattttctttatcatttacataatctgtaaagacaaatgtatacgtcttagtcaagatatcatatgttgctttagctacaacatcgccattcgtacttttaatatctgcaattggcatcgtattattcgagttagagtaatccacatctccattaccagttaaactatctggtaacttcgctgtaaaataatcccctgatttcactttatctgtcactgtaaaatttgccgccataaatgtgttaccactttggttaggatcaaatgtagtcttttgcaactgtagattacttgccgtaactttatcatttacatttgtacctttagcatcagcagcatttactacaggttcagcaactgtaagactacgtacagctctcgttctaacacttggtttactagttccttgcgcattggaaattgtttgtggtgatgattgtggtaaatctaatgtttgaggatttttaagctcactgtttgttgctatgctattagcatctttcgttgttttattatctacttgagaatttgcttcttgaggaacagtttgatcttgcatttttgcagcagttgcttgatctttaattgccgtcggttgaggtgtttcatttgttgaagctggctctgttgtagtggtattgctcgtttgtgtagacattggttttgctgtgctatctacattcgcactgtttgtgtttgcactaatatcagatgtatcattagccgttgtatttaattgaggtgtttctatcatattgtttttttcggaatctgcacttgcattatttttcgaagattgcgttgtatcgttcgattgttctgaagcttgtgcttgatgattgcctatcccaaatagtatagttgcccctactattactgatgtggtacctactgtaaaacgtctaatcgaatacttattctgcttattcgacaaataatcaattctttttttcaaaaatattactccatttcaatttctagattagtctaaattgtataatgaaataagaattatatcaattgcttttcgaaaaaaattacgtaaaatttgttttcttcctatttatataacttaaaattttctgttaactagcaaaaatcaatatactatttttacactattgcaaatgttttacttttcaaaaacttagaagttctaaatttttcattaccttaaattttactgtaatttcaacaatcaaatttaactaacatattaaattaatcatcatgctagcaaaaaaggcctaacgtataaatgtacgttagacctcatgttcaacttattcattttacattgtatattaaacacatacatcattgaataaatgtttgcttactaaccaatttttatgatctttaacaacaagtttttcatctttaagttcatgaataatatgaccagctgtttcccgggaaatcccagccatatcactcatgagttgaatagttaaaaactgtttgatttcataaaattcatcttgatcgtatcctactgtctgacatagatggcataacaatttgataattcgatctttagcaaatttacttgttaatgccatgttatagttcatgtgttgctgctcattatcatttattaatgcaaaaagtgtcaaaaatatatcatcattagctttgcacaaaaaggccatcaattctctaggcaatccaagaactgtacaatcggttaatgctgtgcacaattcgttaacctctttcggatgaaataagttactgattggaaataatacttgctctttattaaaataacgatatacatctccattttgattgtaatgttctctaataatgttaccttcaattaaaaagtaaatattgctactttcttgcggcgaaaaataaataacttggccttttgtataatgtctgacaaaacattcactttgatatggttgtaatatactatatgggatattaatgtaatctgctaatgcctttagttcatgttctaatttattatttctacccaaaataaagttttctgtcataagttaaactccttcaaaccttgcaaagtgtcagcagacaactttttcatttgaatcaacggagaaacatatttaatgttttgtcgcgtgataaagtgctacatgtgaatgtgtgtacctttattaccaatcaaagcttcgtatgcctgctctaaattggtaatgataacttttttgttttccccactttcaacaaatcgtatcgcagcttctatttttggcaacatcgatccttccgcaaacttaccttgtgccgcgtattttttcagtgttgctacatcaatatcatcgatttgttgttgattaggttcattaaagttaataaatacattttctacattcgtaagaatcattaaggtatctgcttcaatcagcgttgctaatttctcactagcaaaatctttatctataaccgcttcaacaccttcataggtattttctttttttataactggaataccgccaccaccgcatgcaatgacaatatttttaccgtctgctaaagttcgaattaactggtgttctagtatagattgaggtagtggtgacgcaactacttttctataaccacgtcctgcatcttctttaaagactgagtctggctgttctttttgtaattcttcaacttcttctttcgtataaaaaggaccaattggtttagttgggttatcaaatcgtggatcatctttatctacttccacacgtgtaacgattgtgcctacagttctatcactattcatttcagttaaaatgcgattgatttcagtttccaaccaatagcctatcataccctgtgacattgcaccacaagtatccaatggcattgccggcgttgtgtcactgttcgatttagcttgttggattaataaacttccaatttgtgggccattaccatgtgaaatgacaatacgcgctggtgaatcaaataaaggtttaaggttttgcatcgcacgtctaatagctgtttgttgtgcttcagctgttgcttcttttgtctgtatcgcattaccgcctaatgcaatgacaattttctctttcatatttttgtcgctccttttaaaaaacatttatcgttcccatcaataacttaattaacccgataactgcaagtacgataataatcataaaaagaatatagtctgatttaatcaaacgtgtctgattattcttttgaacgattgaataaacaagaagagctggaatataaagtaacatcgtcaataataagtaattgatacctgctgcatatataagccatatagcataaattgaggctatgataccaatcgtccattgtttagtagttgcttgctgtcggtgctctaacgtgtatttaacttgataaaatgcactgaacatgtaagggtataaaatagcacttgatgctagtgaaaatgcaaattgatacgcactctgtgtaaatagcatacttattaaaaataattgtactaatatattggtaataagcagtgcatttacaggtgctccatttttattttctttagcaaaccattttggaaataatccatcttttgcaacaatgaaaggtaattcaccagcaagcaatgtccatcctaaccatgcacctagtaccgaaataattaaaccaatatttacaagtgtagatccccaaccacctacaatagatgcaagcacctgtgccatacttggcgaatctaattgagaaatatgattttgcaaaatcacgccttgagctaatacagttaataagaaatagataattaaaactgatataagtcctataaccgtggcactacctacatcttttttatttttagctctgctagaaaaaattactgcaccttcgataccgataaacacccaaactgtcactagcatcgtacttttaacttggctcattgtgctcgcccaactaaatggcaatacaccctctgacgtcataccgaaaaagcctgttttaaaagtgtcaaaattgaatgcaattatcatgcatatgattacaagtaaaatcggtattaactttgcaacagtaacaatactattgataaaggctgctgtttcaacaccttttaaaattaggaaatgcacaccccagagtagtaacgaggcgacaataatacttggtaatgtgttgcctcctttaaaaatcgggaaaaagttaccaactgctgacatcaatagtgttgcataggcaacattgcctaaaaatgctgagaaccaatatccccaagcactgataaagcctacaaaatcgccaaatcctgcttgagcataactataaataccaccgtctagctccggccgttcattggttaaattttgaaatacgaacgctaatgaaatcattcctatagctgtaataatccaaccaataataatggctaatccaccggctttaccgcccatatcagacattatattgaacgcaccgccaccaatcatggatcctataactagtccaattaaagaagatttactgagtttgttatctcctgattcgttcatattcatttctcctttaatatcaatatgaggtgtctgtacatgacacttatatcatcagacacatcatattcatatcgttccatttagtgattaactccccaatgttgctgccattactgctttaattgtatgcattctattttcagcttgatcaaacacttttgaatgttcacttctaaaaatttggtctgtaacttccatttcagctaatccatatttttcataaatttcttgtccataaagtgtatttgtatcatggaatgctggtaaacaatgtaagaatatcgttgaatctttacctgttaaatcaaacatctgttgattcacttgatagtcttttaataaattaatacgttgttcaaattcactttcttcacccatcgatacccaaacatctgtatatatagcatctgtattttcaactgcttctgcaatattatccgtaatcatgactgaaccaccatattgactcgctttttcttttgcaatatcaacatatgcctcttttggatttaatgatttaggtgtacaaattcttacattaacacctaacatagcacctgctaccattaatgaatgcgcaatattattacgtccatctccaacgtaagttaaatttattccttctagatatccaaaattctcttttattgtcataaaatcagctaacatttgtgtaggatgccaatcgtctgttaatccattccacaccggtacaccagagaacttcgctaaatcttcaacagcttgttgtgaaaaaccacggaattcaataccatcgaacattctacctaatactttcgcagtatcctctacagattcttttttgcctaattgaatatcatttttccctaaaaattctggatgcgcacctaaatcaatagacgcaactgtaaacgctgcacgcgttctcgtcgaattcttttcgaatagtagtgcaatattttttccagataagtagtgatgcttaataccgtttttcttatactcttttaatgtaattgcaaaatcaataagtccttcgaattctgctttggtaaaatcactttcttttaataatgatctgccttttaaatcatacggtttttgaatttctgtcattattttcaccctcgcttctataatttattacgttaaatgtcttctctgaatagtggttgactcatacatctaggacccccacgtccacgtaccaactcgctaccagatatttcaatgacttttatacctttttgtctcaataaatcattcgatacatagtttctatcgtaagtcactacaacacctggtcttatacataatgtatttgagccatcattccattgctctctagcaccatcaatgacatcaccatttcctgttggaatgaattggatatcatctatacctagaacgtcttctaaagtatcttttaaatgactagattgtttgatggcaatatctttatttacatcatcatattcaataataaatatattcatattgccttctgcctttaaaatggctgaatgcattgtaaatttgtcatagtctatcattgtaaatactgtatctaagtgcataaatgttcgactagttggaatttcaattgctactacttttttaaacgtcgcctgcggattttcaaaaatacgtcgcgctaacttttcaatagcttgtgcagatgtacgttctgaaacgcctatagccaagacttctttagataaaacaagttcatcgccgccttcaatattgaatgggcaatctcgatctaaccagattggaatattcgcatctttaaatctaggatgatgctttacaatatattgaataaatattgattctcgtcgtcgtgctctccagaacatccgattgattgttataccgtgtcctattgaggcttgtggatctctagtaaaataaaggtttggcattggatctaaatagaatggatacttatcatccatatactctactagatgtgtacatttcggattaatttcttccttacgtactcctgacattattttatctacaagttcttgattagaaagtgtcgcaaataatgccttaatttcttcttcatgacctaatattgtttttttagactctgctaatacatcatcaataaattcacttcttacttgaggattttcaatactttcagctgctaacttctcaaggtaaagtacttcaacaccctcttctcttagcacctgtgcaaaatggtcatgctctttttgagctacttctaaatatggaatatcatcaaatagtaatccatctaaataatcaggtactaaattttctaattcttttccaggacgcttaagtaacacagttttcaaagctccaatttcgctatttactttaattggaccatctgtcatgtctatttcctccttttatctttgaattcatttagagtatagacaatcttcaaacgcttacatgtgattatattcacataaagaaagtcgaaaatttcatatctttttgttatacaatacataataatggatttttatacataaataaaggtattttgggttaaaatatacattttttattcaaaaacacccacaaagacatgttgtataaagttttttatacagtcaaatgaatgactatgaattctttctttccataaaaaaacgcgtacacaagttaatatgtagtaactaacttgtgtacgcacgacattattaaggtttgttaatatacatttaaaacaggactatctaaataactttgcatatacatattctgccatttcattcgaagctgttaaaattaatgtagtatcatttccgctcaccgtacctaatatttcttcaatatttaattgatcgataaagtagttaatgccttgagcgaaacctggtgaggttttgactataatatatgcgccattgataatcgagctaagtacttcatgttcacaataatgtttaaacttttctctcatctcttgttctgtttgattattaatagctttataaatccatgtctcacaatcgatagggacacgatatatattaagttctttcaagtctttagcaattgttgttgcactatatcttacaccaaaatattcttcaatatatgaaatgatttgttcttttttataaatcttatgctttttaactattgtagaaacaatttctaatcgtttacttttcttcatattgtaaactcctttggtagttacgtttcttgtattaaaaaataaattcatgcatgtttcatttataatttaacactttgttttgcaaaagataataaaaatacatgtaaattttttgtgacaacttttaaaatgatttttgtattctaagtcagcatttaattatcacatatttactactagtaataattttagactgccgagtagtctttcggcagacaaccctcacactcctctcatctaattacaaaaagagggtacacctacaaagtcaattatcaatgtaggtataccccatatataagctgtattttaaaatttaattatttataagtgtttaacattacttcttcttgtttatatatttttactccacgcctacttcattccatgcttcatacacctgttcagctgtttgctcgtcatataaatctttagccgcttggtataatgcatctttacaatctttgaagtttgagttacttgttaagtattccgttaatgctcggtagtaaatttgttctgatttagatttccctattgcttgaattacgttataagctgctttatttggaatgccagaattcgtatgcacaccaccgttatctttttcagtgtatacatagtctttcatatgagatggttgaccaaattgttctgggtttgacatgcttcgtaaagcatctccctcttttcctggtgtgtaaacatcttcacccatcaagaaatcctcatcatctacaaagtatccaaaaacatctgaaaagctttcatttaacgcaccagattgatctttatactctaaattcgccgtttcttgtgtcacgccatgtgttaactcatgtgctactacgtcatttgcacctgataaatttgtaaacgtgcggccatcgccatcaccataaatcattttgtctccaatccatgcagcgttatttctgttatcttgtccaccataatgatttacatgtgttaatgagactattggactaccatggttatcgtaagactcacgaccaaatgtatttttgtagtaatcatatgtttgtttagcataataattcgcatctacaccagcacgttgatcatctttgacgaagttttcatcttcattagtaattaatgtcgcttgacctgtttgatcgttaaaagtgtatgctgataatttaccttgatgcgtcaaatcctctaaactaaatccaccatcaatactattgatattgatatcttttgtatctccaagcacacctttacctgtgccagttgctgctgcttctttaactaagttcgttttttcaacaactgctcctgtgtcggcatcaattttaactttccaatgtgaaatttctggtgttactgtaattaattcaatattgtaaatgtatttattactgtcaccatcgatttcgactttattttctttgataacgtcatcttggaggtttttagctttatttttatcaatcttaactgcgttaaatgctttgtcagccgcttcatccttgcttaatgtcactttatttgtcggctttactttctttgcgtcagtatcaccgttgattaaaacgactttacccgatttgtccgcatgcactttcacttctttgtcaggcgcatgcacaccatccacactcggttgtaacgtgtaatgcgtgaatcctttcttatctgtttttacatctgtaacagagtaatcttgataatgattttttacattttcagatttaggtaactcttttaatgctttaactgcatcactcttttgtgtgatttcaaaattaatatctgaagttgctggtttgtgattcgtatcactcgctagtgctgcaggtgtcaaagagctcagcaacgttactgttgcaatacttgtaaatgcatatcttgaaaatttcctcacatttcattcctcctgaaattttaaaaacagcttataaataaaatattaatttaatttttcagaaaagtaaacgattatttctatttatttctatactttttgttcgttgattttatttattgattcttttcttttttaaaaatgttatctgtgactaaataaaattttgaaaattgcacttaattatcttttaaaatttatcaaggctttatttttgtgaaattattaacaatcaaaaaattagtacaacacatacttaatcaacacgtgaaatatatatgctgactacttaactgcgcatgattaaatctatatacttcaatatcatggagacacgaaaactaccatcatataatcaaaaaagactagtatgtgacatcattcctcacatactagcccctatatttactttattatttactcgttttgtatggcgtatgtcctactgtaacttcaaccactctattatgatcaacaacaaaccaaatgcctaatgactttttagaatgttgataataaaaaataccgctatcagattctttcgttttattattctcttttttcaaatctttaccataagctttttgaatatcttttagtgatatattatttttaacgataaattgtaattgattcgcttcatttccttttgcagttacacctttaaaagtttgatcgtatttctctactttttttgtcgcatttgtcttcgctaatttaatgccattaaatgtcacgttgtcatatttaatagcgttaataaaatgcttatccattataaaattagcgttatgaccgatatatccatgataagtatagtaaggtgttgttgcggcctgtgcttcttgatgtattggtgatgcagtccctacaactgttgcgccaattaaagtacctaatgctaatgtcgttgctgcacaaagtttagttgtttgattcatatttatctctcttttccatacaaatttttcaatcttattactattattataacttgcttgtacaataaaatactattgattatatttataaatatataacagttttgttatacttatttgaagtacataaaaactgacacaaacattaatatcgtccgcatttcaagttttatagttaacatcattttgtcgacattgaaagcatgatgccatgcaatgtatgactatttttattataaacggaggcattacatttgaaaaaatttcttattactattgttatcatcttgttaattggtgcacttggattcgccatttatgctgcaataaatcattctacatcgtcaaatcataataatgagcaagataataaagctacccatcaaaagaaagatactgaagtaaatcatcaaaaagacgaaaatacaaacaacacaaatgaaaatcaaaacaacaacggtgttactaatggcaatcaatcatctacgccatcaactgtccaaaataacggttcaacagcaccagcgaatacacaaccatctaatccgaatcaatcaaattcaaatcacggcggtggcagtcaatcgtcaacaaacaaccaaaataatcaacaacagaacacaccacctgctaataaatcaaataataccaatacgccttctaaacaaacacctcaagcacaatcacctaaaaattaatcatttacctgatacgtccacaagtatcaggtacataaattcagaaaaacagcagtgagatatttttctatttgaaatatcttactgctgttctttatttgcataattctcactctgttaaattcatataaaagttcgctttaatgtcattgacgtatgtataagctctcatgtttaataatattaatacacctttaaaaacgcttacacgaaaaatttagaaaggaggtacatgttaaatgcttgatagacacttaaaactactccagttttttattaaaaacccatcaaagcacattagttctaatgaaattgctgaacatgtcaatgtttcaaaccgcacagttcgcaatgatatccatgttatcaatagtaattttatggatgatatcatcgtaagtattaaatctaaaggatatcaattaaatacatcgcagtataccttagaaacgataactgaacgttacacgcatattcaatcatataaagaaaaactattattatctatggcgtatcaactgttaatgcacaataaatcgcagacattgcaacaactagagcaagattatctattatctaaaactgtgctcaacgactatttcgttcgaattcaacaatggtgtcaaaaatttaatattgctttaacaatcaagaaaaaacaaggcattattgtcgacggaactgataatgatataacaaatgccattattcatttaaatcaattatcaaccggacacgttaacgttgaagatcttattttaaatgaattacccgatgcccaccgacggatgatgtcgcatattatacaagagacacttcaacaacatagtattgaaacaactgatattcaaatacaacagcttttaattcatctcattttaatcattaaacgtaagcaatctttaagtgagctagacacgttaaaccacgatgcaaaattgatatctcaatcttgcattcagcaaatcaatacaagattaggttatgatttaaacgaaaaagtaatcaatatgttttcattctttattgcttatcattttaacaaactcgatattggcatagaacgtatatttatacaaagttatattgatcgcttaatcgaattgatgcagcaacgtattcatgtacctttcaatgaagattcgattttacaacaaaatttatataatcattttagtaaagcatatttacgtatcactcaaaacatttatttaaacaatcctttagttatagagattaaaaaactttatccctttgtgttcaacacactttttgaagcgattgataaattagcaattgatactgatatagagatgagcgaagatgaaattgcctttttaacaattcattttcaagctgccatcgagcgtcgtaccaaaacacaattaaatgtagtcattgcttgttattatggtctaggtgtgtcgaattttttagaaactaaaataaacaacttatccgaagagttgtcagtgataaatacgattaaactagaaaatataacacactatcactttgataatgtagatttattaataacgactcatgatattccaaaacaaacgctaaacatacttcctaagcacctaacgactatcaaggtttcaccattattttctgaagatgaccgccacaaaatcagacacgttgtgaagcaaaagcaaaatccggttcaagcacatcatcatatggacactgtcaatttccttgtcgtaaatactgaacaaaaaccacgacatactgtgcaaatttttgaagaagctcaaaaaatattacaagcacatcatgcgattgtagaaggatatatcgaatcagctttagagcgtgagaaatcatcttctacatatataggtaattttatggcgattactcatggagatcctgaaaaagttttacaatcacatgtgcttatttttcgcacaaaagatgtttttccttggcgacaacacgatgtcaaacttgtctttttcttagcgatttcacataaagacaaagcttttacaaaacaaatgatgcaattaattgctaacttggatgatgattcagtgaatcatttatgtagtttagatgatcatagtttaaagcaacagttatttgaatacttacaagaataattgccactagtaacggtaatcattcttttttttagtatcaagaatacgcttacaatatagaaaaggagatgattttatgaaaattgtagctattacctcatgcccaaatggcattgcacatacatatatggctcaagaaaagcttgagcaggtagcaaaagaaatgggtgtggatattaaagtagagacacagggcggtgttggtgctgaaaatgttttaactacgcaagacatcgaagaagctgacggcgtcataattgcagctgataaacaagttgatctgtccagatttgttggtaaacggttgattaatgaaaatgttcgcgaagggattcataatccgagaggtctaattcaaagtatcattaatcaagatgcgcctatttatcaatctgaaacaaattatcattcgaaagatcgcggtaagtctaaaagtggtattcaaatggtgtatcaacatttaatgaacggtgtatcgtttatggttccttttatcgtagttggtggactccttatcgccatcgcgctgactctaggcggtgaaacgacatcaaaaggattagtcatcccggatgattcattttggaaatccattgaaaacattggtagtttagcctttaaatttatggtcccaatactagctggatatatcgctgttagtatcgctgacaagcccggtcttgttcctggtatgattggcggcgctatcgctgctgacggtagtttttatggcagtgatgcaggtgcaggatttttaggtggtattgttgctggtttcttagcaggttatatcgcaaagtggattaaagatattaaagttccaaaagcgatggcaccaattatgcctatcattattattcccattatttcatccgttattgtggggttaattttcatctttttaataggcgcaccgatttcgagtatttttgaggcattaacaacctggttaaaaggtatgcaaggtgctaatattattatacttgcgctgattattggggcaatgatcgccttcgatatgggcggtccagtaaacaaagtagcatttttatttggttcagcactgattgctgaaggaaattatgctgttatgggaatggtagccgtagctgtatgtacaccacccatcggtcttggtttggcaacgtttgttcaaaagtataaattcaatcattccgaaagagaaatgggtaaggcttccttcactatgggactatttggtattactgaaggtgctattcctttcgcagctcaagacccactacgcattatacctgctaacatgattggagcgatgattgcatcagtccttgcagccatcggtggtgttggagatagagtggcacatggcggcccaattgtagccgtattaggtggtattgatcatatattatggtttatctttgcagtgataataggtagtcttgtcacaatgatcactgtcttattattaaaacgtcgcacaccagttatagcagtagatgcaccagcgcaacacacgcaacttcatgctacagatataatacaacatgatacagaggttgacaatgtagataacaccgcgaaacattcacatctcaataaaccttctcatgtgtttaatcaacaaactatcattattgctgatcagaacatgtctcgaaacgaagcaatcgatacgttgattcatcaacttaaagtgtgccgttatgtagagcacacatcgcatttaaaaaatgcaatcctagaacgtgaaatggagtctacgacagctattggcatgaacgtggccattccacatgcaaagtctgatgttgtaaaacaaccgattgtagctgttatgaaaaataatcatggtgttaaatgggaaagtctagatggtagtctacctcaattgattttcttaattgccgtaccaaacaacagtcaggatacacatttaaaaatacttcagcgcttatctaaagcgttaatgaatgatgagacgcgccaatcactaattaatgcaaacagtactacagaaatttataacttattaatgaaaatatagaggagttttaactatggcattatttttacaacccgtttttaaagacagaatttggggcggtcatgcattaaaagcatttaactatgatatccctaatgaaacaactggtgaatgctgggcaatttctgcacatccaaatggccctaatacaattatcaatggtccatacaaggatatgaccctagatcaactttggtcacaacatcgtgaattattcgataatgattcacgagatagtttccctctgctaactaaagtattagatgccaatgataaattatctgttcaagttcatccggatgattattacgctttaaaacacgaaggcgaactaggtaaaacagaatgttggtatattttagatgcagccccaggtgctgaaattatatatggcgtacatgcacataataaacagacgttaatcgacatgattgataatcatgaatttgacagtcttttcaaacgtatacctgttaagcccggtgacttttattatgttcctgctggcactgtccatgccattggttcgggtattttaattttagagacacaacaatcgtccgatacgacataccgtatttatgactatgatagacgagatcaaaatggtcaattgcgtgatttgcacttagagcaaagtaaagatgtgattgaattaggcaatcatgaaccaaatactactcctataacaactcacatcgacacacacactgtaactcaatttgtagacaatcaatattttgcagtatataaatgggatattcatggagatttaaaattcaataaaccacatgcttattgcttagttacaattatcgatggtactggtactttagcagtaaacgataagcactatgacatccaaaaaggttctagctttattttaactacggaagacgaggatattcactttgtcggtaatattagtgctatagtaagtcatcctggataatagcaatgataacacccttcccataaaagacagaaattactatctcttctgtctaaaaacataaaaatccacacattaaggtgatagaaccctagtgtgtggatttcatttttattctgtaacgttactttggtcaactttttcagatacgcgcttcatcaatggatctgttacaggttttaaaattaaacctacaacgaagaatcctatgccaaataacgttaatataattaattttgtaattaagatttccggaacaataccgcctactgtttcacgtaatgaatcaatggcatacgtaaatggtaagtatggtgaaatgttttggaaaaattgtggcgtagtttgaattgggaatgttcctccaccacctgcaatttgtaatacaagcaatacgattgcaatggctttacctgggttaccaagtaatgatacgcacgtatatacgattgagttgaaaataatcgaacagaaaatcgttataagtacgaataatacaggtgactcaactcctgcttttaggattaacaaatctccaaccgatacaatgagtgcttgcaacataccaagcattataaagaatcctgccttacctaagaaaacttgtcttgtcgttaacactggctctaagctcttatgtttattatcaacagttaataggcttaccattaagagtgcgcctacccataccgataatgcagtatagaatggtgtcatccctgatccataatccttaactgggaaaacatcaacagtcttcttattaataggatttgcaataatacccgcttgctttttcaaatcattcttaagtgtgtcgattaatttatcgactgcatcgtctttgtctaacttcttgaaaatcttattcgcttttttcagatctttttcaacatctggcaatttattttgagaaaaatcagctaaatctgataaagcctttttcgcttgtggctgatttttatttagtaatcctaccgcttgatcataaccatttaataacgttggtaaatttttatttacacttgcagtcgcattggttaaacgttgctccaactgtggtaaatcgttacgtacaaagttagctgctttcgctacatcacttttcactttagggaagtttgcttgagcatttttaacagcactaatgtattgttgttcaatacttggtaatactgtttgtaaacgatcgatacgtgttttaccattttttaaaatagattgaccactgttgatgacttgatcaattgtatttagcttagactgaacattagacaatgccgtttgccctttattcaattcatccataatacgttgtgatattgatactaaagagctgttaagatcttttttaacataatctctaaatgatgataatgatgaatctagttttgacagttgatctagtaatttagtagcttcagcagttcctgaactaccattctttaatgcattgcttaattgattaactaaccttaatgattcattaattcgattattagctgcctttaccttatcaatttcttttgataaatcaacattttcattcttctcaatctcttttaatgtatcgataaattgttgattgtattgagttgtgtattctaaaccggacttaacattatctaaagactctctaaaatcagaaggcttgtccgatgctaaaatgccatacgaaatattacgtaatgcctgactatctttttgtgcggctttcgcttgggtatctaaattatttgataatgataataaagagcccgttaatgccgcttccattgatttaacatctttatctgtaatgttttgtgtgttctcgtttgctgtgctgacttgtgttgttgttatatccgcaaaactttgtccatcttttttcccgcttgtactttgtggtgtagtcgatacaggcgcattattactatttggtgcggtattttgcgtaacattattatttggtgcagtattgccatttggtgcacttggtggcgttgatgctacaccattaccagctacaggtgcactatttgatgtttcgttgttcgccgcgctattttgaggaatctgttgctggtttcttcgatttaaatcttgcgcgcgtcgaattgcatcttgataatcaccgactctacttctaacttgtgtgacgaagcctttggcatcatttaactgtccattagcttgatcaataccttgactcgcaatgttaagtccttgattaattttagggaactgcgctggcacgtcatcagctgcaaaatttaacgctttttcaattttcggcatataattatttaaagctaagatcaacttagccttttcattaagttgcggaatagcaccattgacttcgtttaattttttctgagcatctaaaatatcacctttataatttcctagttttctaaaatcattcgcatatttatctaaatccgcttggtggttattcaaatatacaattttattcgcaaagtcattaatcttaggtaaagctttatctgctgaatataccgcattttttatcttattaattgtcggcacattttcttcaatagttaaacctgctttgttagcttcttctaataatgctcgagttactgttttattaaattgttcattcgctttttcgacgacaactgacgaaccagtatctgttagcttagacgcaacagcgttaatcttctgattcaccttaaattctacatctgctttttgaggctgcttacgtagtgtcccggtaatttcatgtgtaaacttagatgggatgtaaatacctgcaaaatatttacccatttttatctcatgatcagctttctctctacttacaaactgccaatcaaaacttttatttttcttgagtgtattaaccatcgtattaccgacattaacttttttccctctgattgtgtcgcctttatcttcattaacgactgcgaccttgatgtgtcccgtgttgccatatggatcccacattgcccataagttaaaccaagcgtagaacgatggcaaaatagctaagcctgctaagataatccacacagctggcgtcttagctactttcttcagatccattttaaataatttaaatgcgttcttcattgtcacactcctatgtaggaattattcatattttttatatattttttgtaaattaatttatttttgcgttgtgaattagtataatcaatttactggaagatatttagtcgattgatacctatcaactattttcagcatacgataaattataacaaatcatagtttattatcacacttaattattatatttttcaagggagaatacgaaatatgcctaaaaataaaattttaatttatttgctatcaactacgctcgtattacctactttagtttcacctaccgcttatgctgacacacctcaaaaagatactacagctaagacaacatctcatgattccaaaaaatctactgatgatgaaacttctaaggatactacaagtaaagatactgataaagcagacaacaataatactagtaaccaagacaataacgacaaaaaagttaaaactatagacgacagcacttcagactctaacaatatcattgattttatttataagaatttaccacaaaccaatataaaccaattgctaaccaaaaataaatacgatgataattactcattaacaactttaatccaaaacttattcaatttaaattcggatatttctgattacgaacaacctcgtaatggtgaaaagtcaacaaatgattcgaataaaaacagtgataatagcatcaaaaatgatacggatacgcaatcatctaaacaagataaagcagacaatcaaaaagcacctaaatcaaacaatacaaaaccaagtacatctaataagcaatcaaattcgccaaagccaacacaaccaaatcaatcaaatagtcaaccagcaagtgacgataaagcaaatcaaaaatcttcatcgaaagataatcaatcaatgtcagattcggctttagactctattttggatcaatacagtgaagatgcaaagaaaacacaaaaagattacgcatctcaatctaaaaaagacaaaaatgaaaaatctaatacaaagaatccacagttaccaacacaagatgaattgaaacataaatctaaacctgctcaatcattcaataacgatgttaatcaaaaggatacacgtgcaacatcattattcgaaacagatcctagtatatctaacaatgatgatagtggacaatttaacgttgttgactcaaaagatacacgtcaatttgtcaaatcaattgctaaagatgcacatcgcattggtcaagataacgatatttatgcgtctgtcatgattgcccaagcaatcttagaatctgactcaggtcgtagtgctttagctaagtcaccaaaccacaatttattcggtatcaaaggtgcttttaaagggaattctgttccttttaacacattagaagctgatggtaatcaattgtatagtattaatgctggattccgaaaatatccaagcacgaaagaatcactaaaagattactctgaccttattaaaaatggtattgatggcaatcgaacaatttataaaccaacatggaaatcggaagccgattcttataaagatgcaacatcacacttatctaaaacatatgctacagatccaaactatgctaagaaattaaacagtattattaaacactatcaattaactcagtttgacgatgaacgcatgccagatttagataaatatgaacgttctatcaaggattatgatgattcatcagatgaattcaaacctttccgtgaggtatctgatagtatgccatatccacatggccaatgtacttggtacgtatataaccgtatgaaacaatttggtacatctatctcaggtgatttaggtgatgcacataattggaataatcgagctcaataccgtgattatcaagtaagtcatacaccaaaacgtcatgctgctgttgtatttgaggctggacaatttggtgcagatcaacattacggtcatgtagcatttgttgaaaaagttaacagtgatggttctatcgttatttcagaatccaatgttaaaggattaggtatcatttctcatagaactatcaacgcatctgccgctgaagaattatcatatattacaggtaaataagtattatattaaacccgtaaaatttataagtataaacaaggagttcggacttaaacatatttctgttcataagtccgatttcttattcaattaaacccgaggcattcagttcgaacgcctcgggtcattttatataaatatattattttatgttctaatgtttctcaacatatccgtttcaattgtcatctcacacattttataaatatgagcaaatgtacttattctcaaacattactgccgagctttaattgacgttatatttactataaactacttttccatgactctacggattcaatgtcacatgagcgtgataaaatttgttcaataataaagtcatgtttatcatctgatctatcaccaacagcatcttctaaaacagtaatataatagtctttatctacactttctaatgccgtgctcaatacagctccacttgtagagacacccgttaatactaaatgattaatatcatttgcacgtaaataaacttccaagtaactacctgtaaatgcgctaaagcgtcgcttagaaataatcggctcatcttctagtggtgctaagtcttcaagtattcgtgtagatgcatctgcttcagtaatcgcatatccttgagctttaattgttgaaaacactttattactcgaggagacatcattaaaatgcttatctaacactaaacgtatgaaaatgactggtattcgatgttgtcttgctgcttcaattgctctctgattcgctttaataatattctttattctaggtacactactcgctataccttcttgcatatccaaaactaatagcgccgtttttcgagacatctttattctcctttacttgtgtagttctaagtcgttaaattcattataacgttaaaatgatggacaatctattcattgcattttgcatatacttcacaataatttaagggggaaataagacgtcttatatacttaaaaaatatatagatgcacttcccccaatataattatgctttatttttcaacttattgcgtcgtgataaccaaatcattagtacacccattgcaccaacaattacagatatcggcaaccaatgttcttttatcgcttcccccgctttaggcaaagatacattaccatcagcatttaataatccgcttaacaatccattacctttaccaagtgttaacgtcttttctggctttggtgtaggtatatctggaatactgtctaataaatttgatccttgattcattaaatttgctaacttatttaaatctgtcgttttcccatttttattcaatcgatctagtaaacttggacgatttactattggtgataaaacatagtctatatcttttttcgtttgattgagtctcttttgtaaattcaataaatcatccgctttatcattcaatgccgatttaactaaattaaaaattttattttgatctgtttctattttagtaattaaatctgccagtaattttgccttttgtctttctatacgtgttgctaaaatcgtttcaattgcttgttttttatctttggcattattcaaaattgcttttaatatatcatctgaagacgtgtcgccagttgatgcaaaatgtttcttcaattggtcaacgatttggcgatttgataatcctttattcgtccaatctttagccaatttatctgcttcagcttttcctaatttcgtttgtaaaatttgagaaatcaacaacgacttatcttgtgattgatcaatcaatgacgttaataaatcatcactcgttgtcagagatagttgatcaatatgacgagtaatttgatctgcaatttgttgatctgttttaccatcaacacgtatatcttttagaattttatctgcctcgtctttgttaaatatactttctaaaatgcgttgtgtagcatactttttatcatcagtacgtgcaagttcttccaaaataatatttcgttgactttttatacgctctttcgtcttatttacttcgctcattaagtctgatttttgatttttaggaagttgcgtatttgcaatacgttgatctaaagattgtaacgtattcagtttatgatatgtgtaatgttgcgttgaggcattacttttagccaatttttcaatcatagcatgattaattttatcgcttccttgtaatttatcagtgagtcgattactatggctttgattctcttcatttgaaagaaatttatttaacacaacatgtccagaaccatcattatttggcgttttagctacttcatgattattatctgttgtagacactactggatctttcgatgcatctttcgatttgcgtatttgctgattcaaatggtctaagtcttctaacgccttatctaccattgcttcatcatttttatcatctttttctccatgttttgttgtagccgtttgtgacatatcatttttcattgcattaagatcgtcctcgccactttgttgacccctatcaacctttgaagaaacctcatttaaatctttaagcaattgatctaatttactgtctatatcactttgaccgttcatttcaatttgagagcctttattgtctttgctatccaactcattagctcgtttaatgatttcatctatttgcgatgctgttttcgcttcatttagttgtgctttataatgtgctttagatgaagccgataactgttttaattgctcaatttgacgatttgctttgtcaactttgtctaataaatcttgcttagataatatctcttttgaaatttcagtatcattttcagatgcagcttgggcatcgtacggcaagatattcgttaaaatgatactagtcgccatcattgtcgaacacgataactttacatataattgaaacggtttccctcgatatttagccatcaacatactcctttctcacttacttccttaaaagaattacatactattatatacctgtttacaagaaatttacacttatctatctagttattgttgttagtaattatctacttattacttagcttatatttaagtaaacaaaacaagcatgacgtaatatcatattgtccatgtcgctaacatcatattacgtcaaatcttttatattaaatgatgttttattttagactgctttttctttttagctttcgaacgcctgtttaaaaacttgctcgaattgttcacgcgagatttcgtgtgcatgtgctttttgtgctaataaagcatctcgaaactgttgttgatctttcaaactttctaacatttgtattaattggtctttactttccattgttatctcatcattatgctcaaataagtgctctgatagtgttactttagcatggtgtgctgtttgacgataacctaaaatcaacaactcatagtcaaacgcttgttccaccgcatttaaaatttcattaccctcattaatatcaagataaatatcacataactggtatagttcatttaccctgtctatattaatagatgggtataagtgcacattagcatattgatcaagttgcattagcttatcagacatctctgtaatagcagcgatgtgaaacttaaaatctggtaaagtttcaaccaataccttgatgttacgaagttgatccgagttagttaatattacaatttctttagtatatctattacgactacgataattatatagatatccgccttgtaaaatacgagatttaacctttgcgtctgctatattgagcatcgtttcatattcgtttttatctggaataataatattacaatgtcgtttcatatcacctttacacatcaattgcatatttcccgggacattaccatcgcactgttcttgccataccaaaacatcactaccatttgatggcaaattatataacactgaaaatggtagggctagtgagttaataacgaaatgatgttccgtaatttcaagttgcttgataaaaaataatacgaatgcgagctttgaagggaaaaagtaagactttccttgccaatccaatatgacatcagatgttacaaaattttcataaatcacttctttaccttctgctgtcatatatttcttcaagatcgctttacgatttaaatcgtaaacagtttgtgcaaatttaataccattcttagaataataatcgacaaatcggacacgttgttggtcatcaaaccattcgacacgactaacaattctagggcgctctccactttgataaaatattttgcctcgtagacgtcccatatcattaattgtagccgaattgttgttacctttaatttcccaaaaagctggtacagtaacctgattaaaaaatcgtggtttcatattttctgtattatgattatctgcaaaaaattgatacggtgatataacatcgtccggtaaaaaaccattgtcattgagtacaattgttaaatcttcctccaacttactggctttaaaagactcatataactttcgtgaatgaccgttaaagtaatcaaataatttaatcatgcagcacctcttgaactaatgtttcccattttaaaataatatcttgagtcataaattgctgtgccacttcataagagatgtaatgtggtgtctggggtccattgttaaaatacattacaatggcatgagctagttttgcgacaacatcatccacactatcttcatcggtatcaaaaggtaccaagtagccattttccccatctcgaataaaggttgggttaccataattcacatttaatccaatcatacctagtcctgagcctaccgcttccattagtgttaatccaaaaccttcgctagttgatgcagaaagaaataactcataatcagtataaatttcatcaagtttaacatgacctagtaaacgaatataatcttgcgcgcggtgtgtatcaataattttacgcagtcgcgtcttctcactaccttctccataaatatcaaatgttaattctggcacttgtcgtttagccacgataactgctttgacaagccaatcaatatgtttctcatttgctaaacgagatgcactaatcatcgcgtatggctttcttgataatgttggatatgataatgcatcaatgcttcccaccggaatagtataaacacgtgggcgataaccttgatattgctcaaattgtcgacaaaccatatgattttgaatatctgtcgctgtaataaagaaatcaatgtatttagcttttgaaaattgatattcataataattgttccatagtatatgctgctcgctcatcatattattactataatgatcagcatgaatcacaacaccaactttactatcacctttatgctgcaaaacagcctgaccaatatcagaagcgcggtctaatatgacaatatcgtctcgggttaaattcaatcgttgtaaaaagtatgcaataaattccgttttgttatacaacaccgcatctgcaaacacatatatagagttgtctccatcaatatattcgttataagcgatggagccattttcattatagaattgtcgcatatataatttcgctttattatcagctggtgcataatactcagaaaatatgcgtgtataactataaaaatctttacgtactaacatactattaattacaaattctgcacgatccacaatgtctttttgttcattttgcagataacatgttacaaatgatgatttcccattaaaatataggcggactatcttaccatttctttctctaaaactaatatcatgaccaagctcacgttcaatgtcatctaacgtgtacgttgttggtgctatagaaatatcactaaaatactgatacaaccaaataacttcttgatcttcaaacccaatgttttgcgttaatgtctgtatgttctctgactgtataaaatctaaaaacacaaatttagtgtcttgatttgtgcgtctcaataatttagcacggtaagcttgtgcatattcaacaccgctactcgcccagcctataccaaagtttatattatatattgtcatgcgctaccccttttcgtttatggaaaatgtataactggcataccttctttatcaaatgtaatcatgctttgacaaatatttttcaccattctttttttgatatttcgtgtcataacttcaaatgaatctaatgcaactctatggtattcaaaaatagcgttacgttgcccattttgtcgttgattaacgtttgcttttaattgttgtaaatagtcgacttgttctaaccaacatgaatcaattgcttttaaaaagactttttgaacgaaaatattataataatatgcactttgcatgtttttacgattcaaagctatttgcttttcaaattgctctaataaaaatgttactacagcttgcttatctttaaaattaacacaagccacatctttattaaattggaaacttaaattttgataaatatactcgacaacacgcgattttgttagcaccttttcctcatttacaaacatttcaaacacatctttagctaacactttaaaatctcgattctcagcatcatctatttctaaaactcgattgcgttcctcgtatacaagatctcgctgtatactaatgcttttttcaaattcattagccatttcacgagctttaaccccttgttcttccgagatacgctgcgctttaactacaatttgcttaactttgcgattaaacaaactactttgcgataatcgttgtgcatctaatgaatataattgattattttccgctaaattactatcgctccatcgcttaactaaataatcatctagtgaaatatatatacaagatgatcctggatccccttgtctaccagaacgaccacgtaattgcctgtctacacggctattttccatatgttcatgaataataacagctaatccacctaatgcttcgacaccttcaccaagtttaatatctgtgcctcgacctgccatactagtcgcaacagtcttggaaccaatttgccctgcttcagctatcatctgcgcttcttttgcaacattttgcgcaatgagtaaattattaggaatatccatttggaaaaatacttttgaaaagtattcagccgcttcagcagttctcgttatgagtaaaaccggtcgccccgtttcatgaagttcaactatatcatgaatcattgcgatgtttttctcatcaactgaacgaaacactttatctggttcatcgatacgttgaatcgctttatcagttggtacttgtacgactatttttgaatacaaatcaaagaactctgattcgcctaattttcctgtagctgtcatacctgaaaatgattcaaaaagtttaaataaattctgaaaggtaattgttgccataacacttttatctgttgaaacctccataccttctttcgcttcaatagcttggtggagtccagcttgcaacttagttcccggtaacatacgacctgtaatacggtcaattaaaacaatatcaccattatatacgaaataatcgacattagattcaaacaaatattgcgcgcgcagtgctagattaatattacgcactaagaccatcgcttgttcgctatataaatcttcaacattaaagtatgattgtgccgcttcaataccttgatttaacagccatatttcttttttggtcttcttcattttaaaatgcacgtcttcaatcaatgtatctacaaactctttcacaatatgaaatagatttgattgtaatcttggtgcgcccgaaataactaatggtgtttgcgcagcatctaaaatgattgaatccacttcatcaataataccgtaatttaattgtggtaaaaattttccttccgcactatctgccaaattatcaattaaataatcaaaaccgagacgtccattagttgtatatataatatcatgttcatatatattacgtttttcccctttttgatactcataatccacaatatcaacaaaacctaatgaagcagttaaacctaaccattcatataatggttgcatctcttcaaaatcacgcttcgctaaataatcattcgttgtaattaaatatgttccttttcccgaaagtgcatttaaatataaaggcatcgttgctgttaatgttttaccttcgcctgtttgcatctccgcaatgttaccttcatgcaatacaatcgctccgattaactgaacttctttaggatacatacctaatactctccagctcgcttcacgtgccactgcataagcttcaggtaacaatgtgtctagtgtatcaactcctgatgctatacgttctttaaattctagtgtcttttgttttaacacatcatcagaatatgatttaacttcatcgctccatgtattgatgcgtttcactatttttctaatcgactttagtcttaattcgtttatcgtaacatctagtttatgtttcatttacttccccaccattcagtttcgatacatctaagtaatctaaaaatcgtaccggattcattaaacgtgacatataatttagatggttgtcttgctcttctttaaaataaacctcgacatttgtatcttttagttcatgatttcctgggacatgttctgtaaaccattcttttaaatcatcatcttcatggcttgtacgatacactttgcaatccaaatgctgagcgacataagttgcaaaaacatttgactttgacccataactaatcaaattaattgcctttagggtatcttgactttgcaaatcattctttagttgcttaatatttccctcgatattgtcgtccatccaacgttcaacgagccaaacatgaccaaacgatttcaaaaaatcattcgaaatagttggataggcgtcagatggttctgcaataatgacattgatcctatcatttccatattggtcatcgcctatcttcgtcacccgcatgcttttatattctaaattatcttgatgcgtcatctctgtaattgttaaacatctaaatataagactcgtcgatgctgcattcatcatttttattttataagcataggcttcatcaggatattgaatcgtaatactatttgactttacaatctcagtacttagttttgtgccatttttattataaaaaatgatgataaaatacactgaaccagcaggcgttgcatcaaaatcaaaatgcaatttataatgctgtcctctacgcaaaattggtaaacttggtgcacttttatattttgaaaattgttttaacatcaaccactcatgaatcggtaatccagagggcatcaaaggatttataaaagttacttcaccatttgaaaatgatacttttgagccatacataaatgtagtttgtgaaatataattccaagtaactttaaatgttttgtttttcagcatgttgaactctcccaaacttgtcttccaaaataatgttgtaaaaattaacaaaccaacttgcaatggtaggtgaatcatcattatgtcgcccaggaatactgcaattcatcactcttgcttggtgtgctgtcaatacaggtagtagctcttgaaatgcatgtggatcataatcatcatgttgcatatatgctatggcaaaaacagtttgtgacaatgatttcttttgaaatgtttgccaaaatttttgatttaatgcctgtatcgacgcttgagatgtatcaccttcattagacaccaggacgtctaatgctgtaccgaactcttctggtctaagtaatcgcatatgttcagcaatcgttccaatattaacaagtggtttaccaacaataattgcctgaggatttaactgagcaccataatacaaggcaccaaatgaccccatagataaaccagataatattaattcatgtgatttaaaattcagcttttctaatgtctcttcaataacattgataataccttgttcatattcagatgaaccgatataaaagctaccaccttcaacacgaggatcgccgattagtaaaaagggtgcattcatacgtttcatcatataatatccttcgaaaccttccgctgttcgataaccactaaaatatacgtttagtggtggtttcatatcaccagggtggaaataataaataaattcctgtcgttgactatctacaaaacgactaccaccgagtaaaaattgacccatgtctaatctagaccatcgtttgtgtataggtcctaaatgtaccgtcccgttccctcgcgccttaacagttacacttatataagcatcaaatggtttcgtaggtatctctaaaggactgtctaacatatcatcagtcaatatgatttgttcaattaatgcaccatcagcgccagtttgaatcaatctaaatgaatattgcaactcgaccgcaccatcaatatcaaattctggccatatttgaatgactttatctttatcgtaaacgagattattttgccaagatgcgataggtttaaattcttttccaaattctccactcaacgtgagctctgaattaccttggtaaacgacatctcctttaaaattcggatgaacaagtgctaacttaggagaaaccttatctccatactgtcctgagaagctaactgcctctaatttattattacgttcttcaatgttccggtaatgtaatggttgaacaacgtatttttggacattttcgtcttgttcatattcaacagaccaaaatgattcatcaacatacgtattgtatggttcgcttatcatttgtaataaattcgttaatgtctccgagtatggtgcttgaatatagataaaatcaaagcgtccttctgcttcaacaatcgcttcaatagcctctacataaccactatcaaattcaaacaatccaatatcgaagtaatcccaactcacaccttttttgtgttggaaaataggttctaaatcgtctcctccaatttgcaaaactctaaatttacgtggcatcattttcaccttctattaactcatcgagctgattaataatattcttagaagcatatgcatctattaattttaaagaataggcgtacgcataattccaatttttcaaataaaataaataataatttaacgcatcatctaattcatcaactgtatttataatacggccattgtcataatcagagacgtaatctgtttgttgaccattaatttgtggaatcccagcgctaattgcactaatttgtaaatacaaatcaggttcttttgacatatctatcacaagtcgcaacgtccgcaatgcttctacaacatcatgttcagcatgtatcgtcttaacagcaatgatgtcatcttgatcttcaggtgtcattaatgctgaaacattaacatcggcattctgtttagcttggtattcctcatttaccgacgtaatacattcacgaagccacatcggtatatcattttgatggcgcgttaataaaattaaacggtaattatcttcttgtgcgatataatccacaagtcgttgcatcatttgttgcaaatcaacgtcactcataccgtctatccatacacctataaatgtttccatcaattgactacttatattaggtgattgtctcgtttcaaatggcgtgattcgaatcattgtattctctcgctgatacttctcttgatgactaattaaatcacgttctagttgcacactatcaacaattaaatgggcattctttacgatagattgatattcctcatctgacacagtttcatttctatttttaaaaaatgaataacttaatgatttcgccggaatatgattggctatttgtcgattgtgcctagcatctgaagccacaatcacatgatcatcttcatgtatttgttgtgcaatcattgcttgaaatttttcttcaattagttgagccatattgttatattctgtttgttgatagtgatgttgatatctttttgaaacagtgactcgtccatttttaaagttttcaaaaagcacacaatctccattaatcgttaaatattcttggtaagaagcctctccctgatcatcaaaataacgtatagctgataaataacctctatcatcaaaaatataacgccgttgtaactgatctctttcaaattcttcaaaccaaattgaatacccttcttgactaaaataaatatttgtataggtctgttcactcgtcacacattttaataaatacggcgtgtacacaaactcaacatcatccggccattttaagtgatgataattaatcgcttgtggcgcatggtgactgaatccttgaatttcatcaaacacagaccaatactttgtctcatataagtcatatcgatgtaaaaatgttcttaaatttggtgcatgattgagaacaatcagacgataatctaagtcattttcaaggtgcatccccatcaaactaatcatatcgtcaaattccgtattattttgtagttgataatacggcacagtcgtgtcttgccaccatcgttggtcatcgtaccaagctggaataaagtatttcataattacctccttaccaatactggtttaaaaatggcttatatttatcaaaatataaatatgtacgaattgtttctgcaatattaatactgatgtaaactaatacaatcagttgtactgagaaataaatttcagtagataaatgcggtacaaacaatgtgaaataaagtggtataccaataatgactgtaactaatgccgatccaaaccaacatacgcgtcgtgcttgataatttaaataacgttctgtatccttaccaggtttaactcctgaaaaataattgccactctttaagaaatctttggatttttgtttagtattgattaaaaatctcgataaaaaataacccaataacatttgaatcactaaatacaccgaaataccaattggactatcaaatgtcatcattggcatatcatctgaaacgtctttattaaacatagataaaataaaatgaataccacttttcaagaaaacaaatgctgaaatactcatcattaaagtaatactgcctgcagggttaactttccaagataaataagatctcatatttgttgcggaaacgttcattaaatcgatatatggtattctcacttctactaattcaatgaataataagataaacaatgtgattatcacaagagtgattaacaacgcaatcacaatatgacttgcatctatatattccattttttgatgcatcattgatttaataatgctaaccattacaatcggcattggtcctgcgatgccgtaacgactatttttgtcagctaaccaaactaataacatcgttccagtaaccaaaatcaagattgttaagtaaatattgtcttgatgaacacgttctttcgaaacatattcatgaatcacaaaataactttgaataacacttaaaattaatgttaagatgcgctctttataatgcttctcaagacttgtttgtttcatgtatttatccatattccgataagaaatcagcatcaagataatcattgatgttaaccacggacctaatcctaaagtgaaaatgtttaaagtattaacgtctccacccatattagaaatagctattttaaaaaatgactcatgttttacttgcatatcgttataggaaacgatggaaatgtttgtacctaatatataaataaacaagataaaacatgtgtaaagtatacgtttatatataattttatattcgtattgttgtaaaagttttaacatgttgcacctcttttatatcaaaaacattaaaaagactaaggttatttcactaattattaaaatctgatatagattttttagtgaacaacgccccagtctttttaattttagccaactataaattcaatttatgcttgagaatcatcttgatcattttcatctttctttttctttctcttcattaaacctaaaccaactaataatgtcataacgccacctagtaatccattttgttttattgagtcacctgtatctggcaatcttttttcactttgtgctggcgtgccattatgtttagtcacttcagatgttgcacttaatgtagactgagattcactcgtgctcgttgttgcttcacttgatgagcgagatgtgctcgtgctgtgtgtatgatgcatactcattgagtctgacggatgcattgagttagattcagatgtacttgttgagccggacatacttgttgatgttgagttgctcattgaagtcgagttagacatacttgttgatgttgagtcagaaatgctttgtgaaccagacatagatgtactcagcgattcggatgtgctcaatgacattgatgtgcttgttgacactgattctgagtcgctaattgatgttgaatcggatgtgctcaatgacattgaaacacttgttgaatcggattcactcattgatgttgagtcagatacgctcgttgaatctgaaccagacatacttagcgattcagatgtgcttgttgaagttgaaccacttgttgagtccgatgtacttgttgatgttgagtctgaatctgatgtacttaatgattctgagtcactgatagaagttgaatcacttgtagattctgattctacagcactttgtgaaccactgatacttattgaagtggaatcactgatactgtctgatgttgataatgatgtcgacaccgacgtgctttgtgatgtcgatgtacttgcactcattgacattgatgttgatatcgatgtacttaaggaaccagatgcacttgtacttgttgactggctttgtgccatagaatcacttagcgactctgatgtactcgttgagctcgagtcacttacacttattgaacctgatattgagtcacttaaacttgtcgatgttgaaactgatacgcttccgctcattgaatcagatgttgaaagtgatgtactcgttgaatttgatccactgatgctagatgaatcacttgtagacactgagtcactttcagatgcactgatgctcatagagtcaaattgactattactagttgagcttgactgagaatcactcacgcttgttgacgttgattctgatccactcatactttgcgagctacttaatgattttgaatcacttaatgaatccgaagtgctaagacttgtggaaccacttaaagatattgatccacttaatgagtcggattcacttgtactagtagaatcactcattgatattgaatcacttagcgagctagactcgcttacactttctgaaccacttaatgatgtcgaagtgctcaatgaaccagatgtacttgttgaagtcgaaccacttgtcgattttgaatcacttaatgaatcagattcactcacgctttccgaacttcttagtgacgtcgatacacttaatgatgacgaatcgcttgtgcttactgaatcactcatcgattgtgagccactcaatgaactagactcgcttacactttctgattttcttaatgacgttgagacgctcaatgagccagaatcactgacgctggttgaaccactcatcgattttgagtcactttcagaattagattcacttacactttctgaataatttacagattctgacatactttgtgaatcagatatgcttacgctcattacttcactagccgatgttgatgtgcttgtcgaatcacttaacgatatagacgcactcatcgaaccagatgtactcgtacttgttgagtctgatgttgaatcactcacactatcagataatgacgttgaatcactcacacttgttgatgtacttgttgaaagcgacatactttgtgaatccagcgtacttgtacgcatcgaagtactagttgaagctgatgtactacgagagtcacttgttgatgttgatgtacttgccgatccagatgcacttgtacttcttgatgtgctttgtgaatcgcttaatgatgttgatgttgaatcggattcacttgtactttctgatgttgagccagattctgatgtactttccgatactgactcacttgtaatagtcgacattcggtttgatgttgatgtgctttgtgaattacttaatgatgttgatgtgctttgtgaatcggattcactgctttgcattgacgctgacgttgaatcacttaatgatgttgacgacgaatcggattcacttgcgcttgctgacgtactaattgcattcgatgtgctttctgatgttgagttgcttgtactttctgagtcactgagcgatgttgatgtactttctgatgttgattcacttgcacttgttgatatactttgtgaatcagattcactctctgaaccacttaatgatgctgatgtgcttgttgaacctgattggctcgtacttctagacatacttgttgaatcgcttagtgacattgatgttgatgttgattcactttggcttgttgactgacttgtatatgatgatgtgctttgtgaatcggattcgctcgtgcttgtacttgttgatgctgagacactttggcttgctgagtttgagtctataccactttgattcattgaggcactcagtgacaatgatgtactcgttgagtcagacaaactttctgatgttgacacacttgtacttcctgatgttgattgggacatgctcaggctcattgatgttgaatcggatttactttcacttgatgatgttgagccggattcactctcactcgttgaaccgcttaatgatgtcgatgtacttaatgactctgattttcttgtactgattgaatcacttgtcgacattgatgcacttagtgaattggacttgctaccacttgctgaatcacttaatgatgttgacaaacttgtagagtcagacaaacttgtactcgttgatgtgctcaatgatgttgagacactctcgctcttatacgctgatgttgatgcgctaccacttgttgacgttgaaatagatgtactgctacttgttgaattgcttaatgatgttgatgtgctaccagattcagaattactgtctgataatgacgtactcgcacttgtcgaactgcttaatgactctgatgttgattcggatgtgctttcactcaatgattcacttaaaaaagcagatgcacttttcgactctgaatcacttgtactatttgattcacttaatgatatagacgtactctctgatccagatatcgcttcactgatagaatcgctcgtcgacgttgagtcgctcgttgaatcagactctgatgtacttaagcttgtggaatcactcatagatgttgatgtacgctctgaattacttgtacttaacgatgtcgaagtactcactgaaccagatgtacttgttgagacactttgtgatattgattcactcgatgcagttgatgctgatttgctatcacttgttgaatcactaaacgacgttgatatgctcgttgaatcggattgacttgtgctcattgaaccagacgtactttgtgattccgacatacgtactgaactacttgttgatgttgatgtgcttgttgagccagactgacttgtactcaatgataatgacttactgtcagaatccgaggtacttatcgaatcacttaatgattctgatgtactacctgactgagacgtgctcattgaactacttacagacattgatttactgtctgatgcagctaatgacccacttgtactgatagagtcactgactatctctgaagtgctcattgagtctgatgtacttgttgagacactttgtgatgttgctatgcttagtgatccagaaacagaaccacttgtgctcgtcgaatcgctcaatgattctgatgtactcatcgattttgaatcacttgtacttaatgatattgatgtactttgtgaatctgatttgcttgttgacgcactttgagagttggctatgctatttgaaatactgatagagtccgaggtgctagctgactcgctcaatgattctgatgtactaattgaatttgatgtactatcacttaccgattgtgatgtactagccgaatcagatgtacttgttgataagctttgtgacttagacaagcttcctgatgtactcatgcttactgaatcacttaacgatgttgatgtgcgcaatgaatcagatgtgcttgttgattgactttcggatttttcagtactgctagagttcgaaatagaatcgcttaatgatgttgatttactaactgaacctgacatgcttgatgatacactttgtgaattcactaaacttgtgcttgttgagcttgatacactattactttcagatgtgcttaatgacttagatgcactcacagaatcagataggcttacacttgtcgatttcgaggtactagctgatgtagataccacaatcgatcctgatgtgctcgttgatgcactttgtgagtcagctttacttgttgacacactttgggattgttgtgtacttcctgatgttgatacggaatcactcatgctatttcttgttacttcatatttaaaagttgtcgtcgttttgttaccgctcgcatctgtagaaacgattgttatagtacttgtaccaatgtttgttggtgtaccactaatagtattatttgtgctatcgaatgttaatccagacggcaatcctgtgactgtatttgttactgcattcccactattatcttgcgtagcaattttaatcggggatattggtgaatacacttctgatgattgatctcctattggtgtcactgttggtgctgtcgtatccacaacatttattgtaaaagttgtcgtcgatttgttatttgtttggtcagtagatactactgtcactgttgattgaccaatttttgttggtgtcccaatgattgaattcgttgcactatcataacttaatccgcttggcaatcctgtaactgtatttgtcacagtcccagtaccattatccgttgtagtcaacactataggattcattgttttacccacttcaatggtttgattgcctacagttacagttggtgcttttacatcagtaaaataatatgtcactgattgtccagcattcgtcatttttacagttttatttgtatcattataagttgatgcatatgaactatcgacagatgtgtaattatatcctttagcagtcaatgcagattgttgattatcgattgtcacgacttgatcaacatttcctgaatatgtttttggtggaataatatctttacctgttgttacatcaacgtatctcacttgtgtaacagcagactctgtatattcgaatgttccaaattgtacttgttgtaaatttgtcgcgccacctgttgaggctgtcattgataatgaaaagttggtcgtaccactttttgcaatccaatctgaaatattacgtgtccatgtttgacctgcatacgtgacagtcataacttttgtatcaccattataattaatatcaaaatcttgaaatgcgttatttgttggttgaatatttaactttgcagcattatcagctattgaacttgatgtatatgttgatgcaacaccagtactatctgttgttacaaaggcaccgaacgcacctccaccagcaacactaggtgggtcagctttcgcctttgctgatacattcggtgtagatgtattgtgatacgtatccaatttgaagccaaatgcgttacttaagccaccgatacctactgcggcaccgtttaaccctgtttctcccaatacaccaggtgaaaaggcaaaacctataccatctccaccatttccatgcccttcatatttgttacctaaatttacttttccagaaaaatgaaaacttttattagagtcaatacgtgttcctaatgtaatagcacctttttggctgtatgcatcctgcgttaacgtcacaataccggtactttgatcataagtagcattacctgacgttgtcatatattgtttgaggttatctttattaaccgtaatcgtattagcggttactgcacttgtcgttgcagttgatgcaaaagttgacatagctaatcgactgaaagttcgaagtttgacaggtgctgtgctggttgacgttgtgctagtttgttttaaatgggttggagctggcgctgtgctttgtgaagtagtatttgatgcagtgctttgatttgttgatatattagttcgttgttctgtacttgaagttgaagctacagatttagtatcagaacttgatgtagtattctttgaggatgttgattctgatgtagatgttaatttttcttgttgattgcttgtactattagttgtcgaagtgacattttcagacttttcacttgagactgtgtcactatttgatgtttgtaccgaactactatttttcgttacgcttgtggaatcggctgttgatgttgatgcttcgattgtcgttgagttttgattgcctacggtttcactttgcgtgtttaattcagatgttaaaggtgcatcagaagccgcaaaagcttgctgatcatgtaacatatttattgtaaatgccccgccgatcactgccgtcgttttcagtccgtatccagtcatttttttactaatgctttgattatcttgactcactatactatgactaataaatggtagtcccattattttgaacatttctatttctttaataccggatttcacccaattttttccagatttataaagtcttactcttgttttttcgtttgctaagctgtcatgaaattctttctgtcttttgctcatgtaataactccttgtattatctttacattcattagattataatatatgccactattcaatttaatacaactcttttttcaaataaaaaatacttaatttgtcaaaatccattttttctcaaaagtatattctttgatgaaatcgctttctttattgtgtgggatttagtataattttttaactatattctgaataacatgtcttattatgtttatataattttgaaatcaatgtttatcaatttagataacttttacttatttagtaaaaatgtctttttattaaaatgtatttaccatccaccttttattcattaatagtcaatttacaactaaaagataaatattatatttataatgcatctttaatattaaagtaatatcaatacattttcaataaacctagtgttatatatctgaatttctaaaaaattcttctttaaaattataaatatagcgacatatcgcttcccggttttgaaatataaaaatacatcaaaactaatttcaatgtgtagtttcgatgtattgaaattgattgaatttattattccttgtcatctgattgattatcaaaatttcttccttctaaacctgcaagctcttctttagaagctgatggtgctttcatttcaaatatttcattcacaaccgtgtaatcataatatcctaacctagcaataggtctaatcgacttaatgtctaatttaccattatcaagaatgaccttatcgtcaatatgaacctgagcaactcttcctataacaatatcaactgttgatacaggatctcctgtcggaatacgtatcgtttgaacgtactcacattcaaaatgtactggcgattctttgactcgaaaacctggtgcttctatacatgcttctttcgtcacacctgcatattcaaattcatcctcttcaggtggtagtgccttcgacgataaattaacagcttctcttaaatcatacgtggccatgttccatacaaaccaccctgtctcttctgcattttttactgtatctttacgctcatgatcaccaagcacagattgatttgctgcgaacataaccataggcggatcccaagttaagttttgatactgactataaggtgctaaattatctttcccatctttcgatacagtagagatccaacctattggacgtggtactgtactacttttaaatggatcgtgtggtaagccatgactctttacaccttgcttcggcgaataattcattctatcctcaccccttattagtaattacatttaaggttacgctctcatgacataagcgtctaatataaataatcaatttatttataagtagaaactatatatgacgtggttgcttataatttgtgttcttgattcgaaaattttagataaggatttatgcaattaatatttaatgatgttttttgttaatttaattaatattagttaatataatcaagattatcttataataatattgaataacattattttagtttttgtataatttgcctatcaactgaaaaacagctaatacaaaggcgctaatgaagatatgagaaaaattatgcaaatcttattatgcacatcaatcatagtaagcggttgctctttcataccaaagtaccaaacaaaagatattccaaagacggttagcgtcaaagattatgatggtcaatatattggtgaacataaaaaaagaaatgaagtatttctgaaaaaacataaagatgaagcaatcaaaaaatacaaagactacgtgaaagacacctttggttatgattgtaaaattaatttagttgaggcctatactaataaatctgggtttagcgagaaaagtaagatagatggtttagtagtcgtcggcactgtcaattatgacgttccttttcagtttagactgatatttgttgagtctggaaatggcatagctatcacaacatttacacctggtcatataaatgaaacatcagcggccgtttcagccatgatgtacaaacgttatgaacatgaaattgaacaagctcgattaaaattcaaatcagaagttgagaaaaatggttattatgccatgaatgaaaaacttcaaaagaaacaagaattcaatggtgttactaaacaatttttgaatttcaacacagacagtattgatgacttaaaaaagtttaaacaagaatttaagtctgttatgcacttaaaaggagatgcattcaatcaacaattacaatctttgattaataaatatcctcaaatacaaaaaaatatggagtcagaatttattgcttattacgataaaggtgagaacagagagactgttgctaactatgtttggaacctacaaaaaacaactaatgacacaatgaaactttatccaggaaataaaagcatcatattttataaagataaagtttctgctacacaattagatgagcataaacgtttacaatcagattctcaagaaatctccatttctggaggggaaaacaattaaaaaccttgaaaacactttagtgtaatatacttccttatccaaataattacaataactttaacaattaaatataaaattattagctataataataaagttataattatattggattggaacactttaactattatttatatttttattttcgttataaaaatactcaatatagaggagatagtaaaaatgagaaaagtaactggctttgtattgtgtacatcacttattttaggaggctgttcttttatgcataaagatcacacaaaagatatcccaaagacggttagcgtcaaagattatgatggtaaatatattggtgaacataaaaaaagaaatgaagtatttctgaaaaaacataaagatgaagcaatcaaaaaatacaaagactatgtgaaagacacctttggttatgattgtaaagttaatttagttgaggcctatactaataaatctgggtttagtgagaaaagtaaaacagatggcttagtagtcgttggtacggtcaattatgatattccttttcagtttagactgatttttgttgaatctgacaatggcataactatcacaacatttacacctggccataaaaacgaaacgtcagccgcagttgcagccatgatgtataaacattatgaacacgatatagaacaagctcggttaaaatttaaatcagaagttgagaaaaacggttattatgccatgaatgaaaaacttcaaaagaaacaagaattcaatggtgttactaaacaatatttaaattttaataccgttagtatagatgacctagataagtttaaaaaggaattcaagcctgtcatgcacttaaaaggagatgcattcaatcaacaattacaaaatttaattaataaatatccacaaatacaaaaaaatatgaagtccgagtttattgcctattacgataaagatgcaaataaagaaactgtagctgattatgcttggagtctaaaaaaacccactaacgaaattatgaaaacatacccaggtgaaaaacgtatgagattttacaaagataaagtatcaccttatgaacttgatcaatatgggcgcttaaatcctgatgcagatgaaatatatgttatcgggggcaattataatgagaaaaaatgatcatataaccgatttagatgctattgaattaagtagtgggtggaattacaatgacaaaataaccttgtcagacgagattcatgttaatggaaataaatataaagttattaaagatcaaaaaccgactaatacaggtctcggttataagttatatgaacgttatgataatgatagaagtacaggaaagttaatcatatcatttgatggtactgactttagtgacctaaacgatgtaggtacagatttaagactcgctggagactccattccaaatcaattggaagaagcacacaaagtgtattctgatttaaaacaaaaatacagtgatgcaagttctttaagtgatattgaattttataataaatataaagaagagtctattgattacaaaggaaaatcaatcacaaatgcaggggggaattcactctctggagccatagcccagtatttaggtgtgttagatccaagtcttagcgtaactactacaaattctgcacctataccaaaatctcttacccgtatggctcgtcgagatgcaaataatatacataattaccacagtagaagtgataccttaactagaattaacataggtggacttatgtatcattccatggtcggaaagcacattttcctagaaaatggtgtgtctacgtttggagcattggtacctgctcatactggatacaactttgaagaaaaagagaagttagaccattttgatcaaaacaatattattaacaaggaagtctacacgagtcgcaatggattgaaaatttatgctgacatggatgaacacactccaatatttgtatggagtggtgatgctattggtgctggtacatcaaaaataaaattagacaaaggacatctggcggatctgaatgactatgtgcatggtagattaaccgaatatgtaaataatattgatattaaaatgaaagacattcgaacatccgttgaacgtgaaaataataattttagtcaacatgtaaatgaaacgaaagatcattttaaaaaagtaataaaacttaacgaattagaaggttggattcacaacatatccaatctgattaggactaaaattgaaagtaaagcggatgaattaaaaggtgacctcagaacacttagagaccaagataatattttagatttagtaggtgccgatcatattattaattcaattattgattttattgataaaattaccgataaaatttcaaaattcattaaatatggtgatgatttcatggaagctgcttttgatatagttagcaacactattgtcaaaatgtttgtcaacttatcagaaggatttgaggatggtgttagagaagaggttttagcccatttgaatgttgtcataccaaatattcaaattatcaaaagtcaagtcactaatttcggtgatggcattaatgatatattgacccaaatgacccatttggatgacaatgtaatggttaacaacgtacccatcaataaaaatgctacgaagcaaacatcaaaaccacttgcagaatctaagaatttattattaaatttagaaattcgaaataaagtgatggaagctggtttggcttcacttgcgtcaagtataaatattttattagtaccaattacatcaaaactcttttatatcattacgtttgttgatgcatgcacgccaacattatctaattttgttggtaagattgaatggattgcctccaaagttccatttgccaagacaacagcggaaacacttaaatctttcaaaaatcttgttgataaattacatcaacaattaactgatatgcgattaatccttggtgaactaattttacagaatttgttattattgagatgcaagactttttcaaaaatgccctactatcagatagccttttaagagatattaaagtattaagttctaatgctaaaggtgacgccgacatgttagaaacggaacttcatgctgttataaacgcaatgtctcaaaacgaaggtaaatctgttgatgcactttaaaatagtaccgcttctctaaaaaacaatctaaccaaattaaaagagcaactcgataaaaccacacattaaattcatatattttgagtgaatagaattatatttccatagcaaacattcctgaactacacatgttacataagagattcatttttgaagaaacgggtaaaatgataaaacaaccgtttttcaaaaaatcaaatattgggaggaataaaaatatgattttacgttacgtgaccaatttaaaacttgcgaaagagctatatcaagccagtaaacctaaattgcaagaagataagggtatgattgaactgtttgaacatacttttggcttgcaaaaagaacttgtaaaatacgtcggcattgcagaagcaactactgctgctttatactcagctagctttatcaataaaaacatttctcgccttgcttcactgtcaacaataggtattttaagtgtagctgcttataaacatttcgaagctggccaaggtaaaaaaggtgcacaacatgcattagatttattaggtcttgctactttaagtttactagatacattttcttgtaataaaaaatagtcttcattttagaagcacatactttagcacctgtgtacttttgattcaatccataaacggtacaccgctatagcatgtgttttgttatttttcaggtctatctattgtaaataatcctcctaatttagcataatcatttccagctaaacgagaaacagcctgtaatgcgtgtggattgattttaaaatcaccctcataaatactgtcatcaatatgataagttacaatttcacctattattaagtcagccccatctaatacatctccaagcaatatcatttgcgatagtttacattcgaatctcattttcgcgtctttaattcctggcgtcttaatcgttgtagatgttaaaagtgataattctgtacggctcaactcactgtcaccatatgctaacggcgctgcagtctcattaatatcttgaacattatcttcgtctgtaatatgcacaacaaagtctccagtccgctctatattcaaggcagtatcttttctcttacctcctacacgttgaactgcaatagcaatcattggcggatgattattaacaatattaaaaaagctaaatggtgctgcatttactgatgtatcttgatttaatgttgtaacaaaagctataggtcgtggaataattgaaccaattaataatttatagttttctctagcagttaatgattgtgcatcaaacgtatgcataatacctacctcttttcttagtatatctaggtatttctcctattttggttaatttaaacatctattctcctctgaaaatcacttgtatttatttagcaaatctattgaaatatgacacatatgcatatcttctggatatttttctaaatgttgctgatgttcttcagcacttttaatgtagttagacagcggtaagacttccactgcaattttatctctgtctttacgtcgttcaatgaactgatgcgcttcaattaagtggtcatctacacaactatataaacccgttcgatacttttctccaatatcatttccttgtcgattcacactgtacggatcaatgatttcaaataaataattcatgatgtctgtaattgttaacatacgatcatcaaaatgaagtttgacacattcagcataaccatcatacggactgtctaatttagagcttcttccatttgctcttcctgcttctgtatgtataattccaggtattgttgcgaaaaatgcttcaacaccccataaacaccctcctgctacataaacaactgccatatttacacctcatcatccttttttatatttttaacaaggttataccatttaataccgccatgacatgattctgatacaccttcattacgataaccatatttttcataaaaagaaattaatgattctcgacatgttaacgttacaccatgtcgatgttgattcttagcaagattttcaaaatagtttagtaagcgacctgcaataccctgaccttgataatttggtgctacaacaagacctaacacactaatataaccaccttcactattatttgcggggacatttttaaataaatcatcgctaatgtaacgctcttttatgacaggaccgttgatatatccaatcacttcatcattcttttcagctacaataaaagtttcttgaatttgttcaattctcaatttcaatgcctctggtgttgcagcttcttccggtgaaaaaccaatattttcaagtgcaataatttgatctaagtcctgcatgattacttttcttaataccataaaaacacttccttagccctatatatcaaaagtaataccttcatctatatattcattattttcaaactaccttcactataaaaaacgagtctttttattaaaagccattcgccttaatcaattagacaagttgtattatacgaattagcaaataatcataattataattcattttaagcatactcaaaaagactggtacatgtataccagtctaattcgaaaaaatatatttagttaaaaccatttcaaaaacgacttcacttttcctggcttagtcggtctgtctagataaacaaaattatcattgattactgaactggcatttcgaagtaatgcttcaatgtcattcgaatatttcttcaatttatgattgtgaaataattcttgcatcaaaaatggtctttggtcacatgaatgtgcatctgaagctacaaaatgagccaaattacattctataaattgtaatgataacttttgaatgttttttccaaatccaccaactaaagaactcgatgttaattgactcaatgccccatttgcaacaagttcatataatatttctggatttttggcgatacttctatttctttcaggatgtgcaatgattggtatgtagcctctcgattgtatttcaaaaaacaattgttttgtataatgtggtacttcgcccgttggaaattcaattagtaaatatttcgaacgattaataccttgaatactaccattatctaagccttgcagaatcgaatctgtaattctaatttcttgcccgggaaataatttaatatccaatgcttgaacttctggatgcgttcttaactccgccaatttcacaagcacttgttgaaatgtattatcatatctcggatgcaaatgatgaggtgtcgctacaatacttgttacaccttcatccttagcttgctttaatagtgcaatactcttttcaattgtcttaggaccatcatctatatcaactaatatatggttatgaatatcaatcatgattcatcagtcccataatatgcatagtaactagcacttttatctttaggcattctatttaagactacacctaataatttagcacctgttgcttcaataagttcttttccttttttaacttcatctttattattattttccgaattaactacgtagacaacattgccggtaaactttgaaaataattgcgcatctgtaactgtgttcactggtggcgtatcgataattacaaagttataattcatcaataatgtgtcatacaaattcgcaaatgctcttgatgtgattaactctgatgggtttggcggaatcggtccagacgtcaggacgtctaaatcttcaatttcagttgagataatactatcttgataagttgaccaatttagcaataaacttgataggccttcattatttggcaaattaaaaatatagtgctgcgtaggtttacgcatatccccgtctacgattaatgttttatatcctgcttgtgcatatgcaactgctaaatttgctgcaattgtagacttacctgcgcctggtgcctctgaagtgattacaatgctttgaactgcactgtcaggatttgcaaacataatatttgatcttatgcctcgaaatttctcgctaataggtgactttggttgttcatggacaattaaacttgatgtacttcttcgtgtattcgtcatggtaattcctcgtaaattaaaatttttgtattgaacctaaaataggtaatcctagttgcgattcaacatcttcttccgtcttaatacgcttatctaataattcttttaagaaaataatcaatattgctaaaacaataccaacaatgatactgattactaagttaacagatactattggagatacttttacagcattatcatgtgctgaggaaagtattgtaacattatcaacactcataattttaggcatgtcatgtgcaaaaactttagatattctattaacaattttgtcagattcagatttattcccagttgtaactgatacagtaataatttgagagtttgtttgattggttacttttaaaaacgaattcaactcagctgttgaatactgaccatcaaactctctagatactttatctagaattcttggacttttgataatttccgtatatgtattaacagactgcaaactactttgaacattttggaaagctaaatcacttgaggactttttcatgtttactaatatttgagtagaagcagtatatttgtcaggcataacaaaaaaggttaatgccgcacttactacaagacatattgccggtaaaataagcaataatttaatattcttctttagaatatttaatagttttactaaatcaaacttttctttcatggtttcctccacataatcaatcattgtattcattatgtatgttttataaatcggacaattatatctagtttaacgaccacaaaaatacacaactacattttctctaattttttatataaatattttatcgtttaaaattatatcatgattcttggtcgttatgtataatttatttatattttcgttcgagatataatattgtccaacttcaaatatccaaacctatcagtaataaacctagataccatcgtctctatcatggctttcttataatcgagtagaagcatcatcattacttgattatttgctctttacaacaccgagcgtgcccgtactcggtaattcaatactttgcgtaacccgtcactgtgagttgggttaatgatgataaagcccacatcttttaaaaagatgtgggtaatttatataatttttatttacattttaaacttataaaaaaaagcgcctatgtcatgatttaccatcacataggcgcttatcaataaattattaattattactttccatttcatctaatttatgcggatttcctgtaattagatgacaacttattcttttcaggggaacattacacttttataatatgttcaaagacaaacttaaccattcacaaatataaagaataatattatcaaatcattgaacaaatcgtattttgcaacaattgatatttatattaatgtattgtatttaatttataaaattcatatacatcttaatattctcaatttcgagttgtattgtcaactttatatagatttaaaaaaataatctcatgtctttttttacaaaagtaagttaattattacaaactagtaacaaaaattatttcttcaaaaatatatttagtagcgaatacacttcatctttgaattgacttttgctttcttccactgctccaaatttttgcgaaaaggatgctttcaaataccaactttcaagaaacagcaatattaaattctgaaagtcttcttttgtcatctttatctttgattcatcatagaattttgctatctctttacttaacgattgatttaaatcttgtatttgtccgtaaatatttccagaaaattcctcaggcgtattagataattgaacgtacattctaatatacctttcttcgatgtcgaaaataaactcaaataagaattgatataaagcatcaattgaatagttcgatttattttgattcatcataataatattattaaggtaatcaaaacagcatttaacactttgttcgtaaatactttttttcgagtcaaaatggtaatataaactcgctttttttatatttacacttttagctatatcatcaagtgttgtaccgtcataccccttctctgaaaataaggttattgcgttatcaataatcttatccttcaatttttaaaaccccctactgaaaattaatcacactatgttacaggaaaattaagttgcaattacaaatatttccgtttaattataacaacaatctattgcaaattaaaatactatcaattaccatatggcttacaacctaactaacgaaaggtaggtaaaggaattgcaattttttaactttttgcttttttatcctgtatttatgtctatttactggattgtcggttcaatttatttctattttactagagaaattagatattcattgaacaagaagcctgacataaatgtggatgaattagaaggcattacatttttacttgcctgttataacgaaagtgaaacgattgaagatacgttgtctaatgttcttgcactcaaatacgagaaaaaagaaattattattattaatgatggaagttcagataatacagcagaactcatctataaaattaaagaaaataatgactttatttttgtcgatttacaagaaaacagaggtaaagccaacgcactcaatcaaggcattaaacaggcttcatatgattatgtaatgtgcttggatgcagatactatcgttgatcaagatgcaccatattatatgattgaaaatttcaaacataatccaaaacttggtgcagttacaggtaatcctagaattcgaaataagagttctattttaggtaaaattcaaacgatagaatatgcaagtttaattggctgtattaagcgaagtcagacacttgctggcgcagtcaatactatttcgggtgtcttcactctatttaaaaaaagtgcagttgtcgacgttggctactgggatactgatatgattaccgaagatattgcagtttcttggaaattgcatttacgtggatatcgtattaagtatgaaccgcttgccatgtgttggatgttggttccagaaacgttgggaggtctttggaagcaacgcgtgagatgggctcaagggggacacgaagtattactacgagacttttttagcacaatgaaaacaaaaaggtttcctttatatattttgatgtttgagcaaatcatctcaattttatgggtatatatagtgcttctatatttaggctatttgttcataacagcaaacttcttagactatacatttatgacatatagtttttcaatatttctactatcatcatttactatgacttttataaacgttattcaatttacagtcgcactctttattgatagtcgctacgagaaaaagaatatggctggactcatatttgtaagctggtatccgacagtatactggattattaacgcagcagtagttcttgtcgcatttccaaaagcattaaaacgtaagaaaggtggttacgcaacatggtcaagcccagacagagggaatacccaacgctaaaatcatcgctaaacattgtaagagaaacagcacttatcgctatatcgtgtgtcttttggatatattgtttagttgttctactcgtttatattggtactatatttgaaattcatgacgaaagtatcaatacaatacgtgttgctttaaacattgaaaatactgaaattttagatatatttgaaactatgggcattttcgcgattatcatttttgtattttttacaattagcatattgattcaaaaatggcagagaggaagagaatcgtgaagtatagaaaattaataattttagtgttgagtatcttgatcatattgcctgtaagcacactggatggtcatcatattgcaaatgcagatgacgatccacctaaaaaactgaaatataaagaaaatagtgctctggcattaaattatcaccgtgtaagaaaagcgaattttctgaataatttcatttacttcttttctagtagtaaagaaattaaaaattatagtgttagtcaatcacaatttgaatctcaaataaaatggctaaaatcacatgatgctaaatttttaaccttgaaagaatttttatattacaagaaaaaaggtaagtttccaaaacgaagtgtatggattaactttgatgatatggatgaaactatttatgaaaatgcttatccaatcttaaaaaaatataaaataccggcaactgggtttattatcacaggtcatgttggggaagaaaactttcacaatctcgatatgattagtaaaaaagaactaaaagaaatgtataaaactgggttatgggaatttgaaacacatacccacgatttgcataacttatctaaaaataataagtcaaaattaatgaaatcttctgaagctacaatcataaaagatttaaacaaaagtgaaaaatatctaactaaaaactttaaaaagtcgcagaaaactatagcctatccttatggcttgatgaatgacgataaattaccggtaatcaaaaaagctgggttaaaatacggtttttcattagaggaaaaagcagtcactccgaactccaatgattattacatccctagaatattaattagtgatgatgcttttgagcatttaattaagagatgggacggattccatgaaaaagattagacttgagctcgtatatttacgtgccattatatgtgcaattattattgttacacatttattaacacaaattactttaaaacatgagaatatggaaggaggatctttagtactacagttctatattcgtaatattgtcatttttggtacaccttgctttattatcttgtcacagttactgacaaccttgaattaccaaaaagtcacctatagatacttaactacacgcgtaaaatatatactgattccttacatattaatgggtttgttttacagttatagtgaatcattattaactgacacaagttttcaaaaacaatttattgaaaatgtcctattaggtcaatggtatggctattttatcgttgttatcatgcaattctttattttgagttatatcatttttaaaattaactataacctattcaacagtaaaatattattattgttatcttttattttacagcaatcatttttatattactttacgaacaacacagcgtttcacgataccgtgctacactattatccattaagtgaaaacactataatattcggatggattttttatttctttttaggtgcatatatgggttataactacgaacgtgttttaaatttcttagaacgttatttagttattatgattgtattagctgtagctacttattttgtgtttattgcgttagcaaatggagactattggaacgttaccagcttttcatattcattaacaccatataatagtattatgtttattgttatcttgggtatttgcacgcattttaaaacaatgttatttaatacgattcaaatgattagtgctttctcattctttatttatttattacatccaatcattctagactcattgtttgcatatactaatattttcgaagataataccatggtctttctagcaatatctctattactcattttaggattatgtatcggtgtcggtatgatattgcgcgaattctatatctttaggtttattattggaaaacaaccatataaattgaacattaatgcttattaattattaagctatgttaaaaacacgcggtgggcgaaatcagtttgaattgactgacttcgttttaccgcgtgtttaatattgttatacatatattcttattgcacatttaaactacgtaaatgccaataggagtgggacagaaatgatattttcgcaaaatttatttcgtcgtcccaccccaacttgcattgtctgtagaaattgagaatccaatttctctttgttggggccccgccaacttacattgtctgtagaaattgggaatccaatttctctttgttggggccccgccaacttgcattgcctgtagaatttcttttcgaaattctctgtattgggggccccgccaaggtattacttgaataactcttttagaattctaaataatgatccgattaattgaaagaagtctgcagtcattattaattcctccctttactttataaattatgcttgcttagtatcagtcaccttttcagttttcactaaatcgtctgctaaatgatgccaaaaatcttgtaattcttctcttgtgcgcactgtatcagaactatcttgtccgacaaaatcaacatgatcccaatcatgttttgtaggcgttacttgccaaatgcctttttgaattttatccgtcgcatttgtataagcttgattaaatggatgttgagaagaaataacggatactaaaccatcgttttctcgccattctttttcagtagctttaccgattaagttaccagtaatcacaaatgggaaaaacatatttaagtctgctttttgtctatcactatttaatgctttgtgcgttgcttcaccagtgtatgttttatacacaatgttagggttcaacgacgttttacgatttaaatctgttgcaccctcacgcgtcaaatcgtaaaatccattatcttttgatttccataaattagattgtttaacgcgtttgacataatcaatgtatgattcatttggcttctgttttagaccccattgagccaacccgaagtctactctagagtttttattaccaaacattttaccgatatcaaatacaatttgtctcactaaagcttcattaccagctaaatctgaagcatgcgttccattatgtggcgttcctaaagtagtaattgatgaaatcatattgtcattattacctttgaatagtggagaaatttcgccaccatgtttcttttgatactctatttcttcacgactaccattacgcagtaattcttctagttgacgtatcgtttgaccacccatactatgtccaacaaggtgtaccttctgtcctggtttccagtccttgtaaattccttcgtatgtttttccataacgttcatgaccatattttgctgcatgtgctgcaccataatctacacgaccgcctttgatataataataaagttcaactgcgcggtcatagttacttccaaaagcacttatacttgcttcataagctttgtaaccattttcttctaaatcttggcgaatgttcattttattaccgccccaataatgagctaacactgaaggattaatatcatctgtaaaaccattgaaaccatgaactaaaacgatagggtcttgatttttatactgcccttgtttggcaactttatttgtttgatcacctgttgcttttgcagtaagttcttttgttcctttgttaggtaacgttgctactgcactactttttaataaattcaatccttttttcttgtcattgttctttgttggttcaactggtgatttttgattgttttttaaatctgaaacagaaagtgttttttcatctttttgagggttcacttcttgttcattgttaaaatgatggctggtcattttatcattcgattgattcttttgttgcggttgtactttctctatttctgtctcattaacaatttctcgttgacttgtttgatctgacttatttaatgatggtgctacctttgttcgactttgtgaaggtagattgttattagcgtttgagtcttgactattatctgcctcttttgactgttgctgtgacgccactttactttgtttgccatcattaatagcctgttctaacccttgatttacatccctaggattagcattgttattttttgttgtatcacgttgaatatttttattattaagcgatgattttttatcatcctttagttgatctttattcaaatcatctgttttacgatgattttcttctgatattgttttatcattatgcaagttcttagttaaattttcagtatgttgctgttcgtcaacaccgttttcacgttgataattagcattttccctagtttgttgatccccaatagattgtgctgtaactgtatcctcctgtgaatttcccatattcacttgcttctcagctgcttgtgcttgtccaccacttaaaaatagtaatgtagctattaaaatggaagatgcacctacactaaatttacgaatactatacttattttgacttttcatcattgtcagcacctctatttttttattttagataaacaaattgataattattcgaggaataaactcaaataatttacttaaccaagcactcataatgaccatcctttctattgtttaatttgattagaaagcgtttacatttgtatttaaaaaatatattctccaaagagaatttaaagtgtatacgctaatcatttcaaattattaattaatattatatttggcaaaatttaattagtcaataattagacacaatttaattatgcaaattgtaacttttttacatatatcttttgtgatttttaatatttacatgcttgaggcttgattccaatgatgtattatttttttagattagctgtatggggggatttatgatctatcacagttataatgtttgctggtgtcgtattttaaaccttaaaatatcatcccatccacaatgattgtattaggataagccattacgcttgttcctacattatatatacagttaattttcttccctcaaaataagtatcctactatttttaatttattgtttaattactcttgaactacctttaacttaatctcgaatttatgatgattagcataaaaatacaccccataaagttagttttttagtccaactttcgggatgcacatcttagttctaatggagattgtcttttaaataggctatgacatttctatttcaggctagatatatttttatttacagtataaatacaaagaatataaagacaactatgatattaataggtagtaacgacaaacataactttttagctttttcgccattttttcccttcataacttcattatatcgattcatatacttttcaacatctttaacagtgacatctattcctgagttactcaattcacttttcaaattatttttggtttcgtattgtgattatccactacttatttataacgagttcgcaactttagtaccatcacagcattcatagttaaaatatgttggtgtcgtattttaaacttgaaaatgtcacgttttccacaatatttgtaagtgtatatgccatgatccttttccttatatctcagttaatacttgctttaccactgttcgatattttgtcgttcgcctttaaagttattgcgcttatgatgtctacgtgctaattctgcctcaatttctgaaaaatcaacgcctagcgcatgcatcaagacaaataaatgataaagttcatctgctacttcacttacaaatgcttttttgtcacctttaattgcttcgattacgacttcaaaagcttcttcaccgtatttttttgtaatcttttctataccttctgttaataaatattttgtatatgacttttcattattggattgggcactatcttgaactgtctgcgctaatgtttgcactgaaaatggaacttctgtgttgaaacaactttgactgcctgtatgacatgttggtccatttggtatgacatcaattaaaatagtgtcattgtcgcaatctacatggatatctttaacacgttgcgtatgaccagatgtttcaccttttgtccatagccgttgtttcgaccgcgaatagaaacataccacaccatcttctatcgttttatcaaaagcttcttgattcatataacctaacatcaatacttgttttgtttgattatcttgtaaaattgctggcactaaacctttgctaaaatcaattttgtaattggtcatcttactgctatacccccttgccgtatcacttctttaatagattgaaccgtcgtttctcggtcatgtaatatacttgcagctaaacctgcagaaacatccgtctgatcaaataattctacaaagtgttgtgcattgccaccaccaccagaagcaatgattggaatatttacaagggattttatttttgcaagatgctcaatatcaaatccttgtttcataccatcatgccccatacttgtaacgaggagctcacctgcacctaactgttctacttgctgtacccagtcatatactttaatatttgtcatttttttaccaccatgcgtacaacaataatgtgcttttctttcaggatcataatagctatcaattgctatgcagatgcattgtctaccgaatttatcactcgcttgtttaattagctgtggattttttaaagcacttgaatttaatgatactttatctgcaccatgatttaacaattgggtaatatcatcaaggctttgaatcccaccccctacagtaagagggataaacaagcgtgacgctgtctgttcaatcacttctagcattaagctatgaccctcttccgtcttagagatgtctaaaaatactaactcatcagcacccgcttcattgtaatacattgctaaatcaacaggattcccaatatcccttaatcctttaaattgaatccctttaacgacacgaccatctttgacatctaaacatggaatgatacgttttttaatcattttagcccctcccaaaatgatgcttgatgtgcagcctttcctataatagcagcgtgaacatttagcgacgctaatcgttgaatatctttctgatgtctaataccaccagacgcgatgacaggaatcgtcgttgcctttactaattgaccagttaattcaaagttaggtccggacattttgccatctttagcaatatcagtatatataatgcctccaaggggtatatccgataactgtctcacaaaactaaataaatttaactctgtgtcctcttcccacccgttcactttaatatcttctccataagcatcaacagataaataaatgcgacctggaaatgtatgtgccatctctttaagccattctgtatcttgaatgcctttcgttccaactatgcaataattaatccccgcggcaaagtagtccatgatttgtgacttcgtacgaatgccaccacctacttcaatatctttggttgttaatctcctcaatgacttaatataatcaaactctcgggcatgctgtgccttagcacctatcaagtcgacgatatgaatacgattcacacattcaaattgactatagtaagcaatactttcttcagccgaacgcgacattttttcttcactatcatatttaccctctgttaacctcacacttgttgacccaatcaaatcaatcgctggccataattcaatcatttataaatcccccttgtatcgcctgacgcaaaatttgtaacccatatgtaccgcttttttcaggatggaattgaataccaatataattgttaaattggacaattgctggaatatcagtaccatactgcgcatatgcaatgacattttctgacatcggcgcttggtaagaatgtacgaagtaaacatcttgatttaacataggatgcttactcactaaattattccaacctaagtgcggcactgggtattctgtttggatacgcgaaatatttcctgggataaaccctaatccagatgcatcgccttcatcactatgctcatacattaactgcattcctagacaaataccgatcattttcttatcagtattcttagccaatattgcatcgagatttaatcgctttatctctgacatcgcatctttaaaatgaccgacacccggtaatatgattgtttctgcttgatcgattatatttttcttatttgagacaaccacctcataccccaaatgttcaatagcgcgttttacattactaatattccctaatccataatcaacgatgacaatcattcaatcacacctttcgatgacggcacacgctgatcatcagttgcagttagcgctatgcctaatgcacgggaaaatgctttgaatatagcttcaatttcatggtgtgtattaccaccacgaattaaatcaatatgcgttgttaatcttgcattgattacgaccgctctaaaaaattcttctactaactccgtatcaaacgtgcctactttttctttacttaatgatgcattgaatgataagtatggacgcccacttatatccacaacaacacgtgctaatgtttcatccattggaatatacattgttccataacgaacgaaatgctttttatctttaatcatttcaagtaacaattggccaataacaatgccgatatcttcagttacatggtgatcatctacgtcgatatcaccttgtgcctcgatgtttaacgacagtccactatgaaacgtaaacaaagttaacatatgatttaaaaagcccacacctgtattaatatgcgatggtgactggtcatctgatattgaaatatttagttgtgtttcagctgtgtttcgttgtttttgataaatcatattttgcactccattctttaacaatttcttctaattgctttaactgtgatgctgttgcaattgaatatcttacatagcccttcatcaccggctcatcataaaaacgaggtttaaatccttgttcatatacgtattgtcctaattgttgcgccgctgaacctttagtaagtacaaaattagcatttgatgggaatactgacattttgtctgcaacatgtgtatcaaatatttgttttaactgctcagctaactgtcgttgcattgttaaaaattgtcttgtctcttctctatgtctaaaaatataagtcgcaatatttagcgtaaatacatttaatggatatggatgttctattttttgaatacgctgtatcgtttcagcagtactcattaatacacccaaccttaagccggcaattccaaacgcctttgataatgtgcgcattcttaaaatgtgtggtgccatttcaacatcatatgccttgccataatctaaatatgcttcatcaatgacaaagtatccgtttattgctttcatcttatctgcaatagctgttaaaaataccgtatcaaattgcttgcctgaagggttatgtggattactcataataaaaaatgatggttgtacttcatcgattttcgttaaaatggtttccaaatcaaacgttaaatctgatcctgcatctacaaatgcaatttcacgatttacttgtgccgcatatgcttgatacataaaaaaatctggatttagcgttaacgccggaccttctggcatgatcagcattaacttttgaatcaattcatcagagccatttcctgcaataatctgttcagacgataatccgtaaaatttagcataagcttccttgaattgttcatatgctgcatccggatataaattatatggcgttgcactaataatagacgtcattgttttttcatccaacggcgtaactgggctttcatttttatcaatataaatcatttcatttacactcccctaagactgacgtattaaaatagactgttggtgattgtataatgcttcaacatgagcaatatgttgtgctgaatcagcaatttgatcaaatgtatcttttgataaatgaatgaccgtgttccgtgttaagaaatcattgaccgataacccattggtaaatctagctgttctatttgtaggtaatacatgacttggacctgcaacgtaatctcctatgacctctggcgaataatgtccaataaacaatgcgcccacatatttcactttttcaatatatggttgaggatttactgtttgaatcgacgcatgttcaggcgcgattgtattcatgacatggcatgcttcatcaaaattactagcatggataaggtagtgttgattagcgatacttttagaaacaatgtcgtatctgtccacattaggcaatgctttagcaatacgtgattctaaatctttaaggacttgcgcatcttcactaatgacatatgtacgtgctaattcatcatgttctgcttgcgcaaatacatcatatacgatggcatctaaatctgcggtgtcatcaataatcagtgctatttctgttggtcctgcaatttgatcaatacctacctgtccaaataaatattttttggcatatgcaacaaattggtttcctggacctacaatcttatcaactttaggtattgtttctgttccataagtcaatgcagcaatactttgagcgccaccaacttgaaacacttgattaacttgcgtaatataacatgcagctaatacctcttgggatactccgttaggttgaggtggtgtcacaacaacaatattttctacacccgctacttgtgctaaagtcgctgtcattagaaccgttgatggataacttgctttgccaccaggcacataaatacccacactttctagtggatggtatatttcataacactccactgattcttctaactgttgattcgtctgcttaatactttcttgatatactttaattctttcataactttgttgtaatgcttgttttgttttttcatctaatgtgtcaaatgctgctttaatttgttcatgactaatttctaaatgatctgttttcgtatgatcgaatgttagattatacattttcaaagctttatctccatgaaccttaacttcctgacaaatatcgcgaataattggatacaaagactcatctaatggtgcttctaatgaaaattgatttaaaaattgttgtgcattaagcattggcaatagacacctccaaagagcgaataaattgctctattaattgtgattttttaaaataagctgctttattagttattaaccttgcattgatatcactaatatgttgcttttcaaccagtccgttcgcttttagcgtagtacctgtttgaacgatgtcgacaattccgtctaccatatctacaacacaggccaattcaacagagccattcaatttaatcaattcgacatcaataccttttgatttaaaatatgtttcagcagtatgaacataactcgttgcgattttacgataattggtcgtttcaggtttcgctgcaaccgcaaaatgacatgctccaaaaggcatattcaacaaattattaacattatattggcgctcatctaatatgtcgctaccaacaatgcctatgtcggccattccttgttccacatagattggcacgtcacttccttttactaaaatgcattctatattatctacacttaataataattggcgttctctattttttaatgtttctgataatgtcgtatattcaattacatctaaatagttaattaaactatccattagacgtcctttggctatggcaattcttaacattgtgcatactcccttacttaaagtgttaaacccaatccaaacccttcgatgcttcctttgtaataaccacctgttaaaactcgagattcattttcagcaaaatgacattgaataaataaacctgtgtaataggatctaggtggctgcgcagtaatatctaaatggatgtctttgtaaccttgtgtatgtaaccaacgttcccatatttttaattcaacgagtgctggatggtcatttggaatatagtgttccaatacatttaattgttgttgcgtattctctttcaagatttgcacgattggatgttcagtcgacaaatatgtaaccagtcccgataaattacgttcctcaatcattgatagtatgtctggtgtttgtaacgatttatcgagtaaggcatcaagcaattgataatgtcccaatacaacaaaatgcacgttgtctctcaactgctgttgaataaactgaataaatagctttaagctctgttgtacattcgctaatgatggtgcatagttttccaaaccaacttgtacagccgcttcattattccgaatgattaaacctgtgtatgccacttttgttgctgcagttggatacattgagtaataacgcaataattgatctgtaaaatcatttcgaagtgcataaatttgatgctcatgttgccaaaaatttcgctcacccatctgctgcaaatcctcatggttcaattgtttccagtccaacttttcaaccacactaaaatcaactaactcataatccgctttattaaaatattttaaaaatgctgtttccgcttcttttaacgcaattaattgttctgaattattcactcgaccaccctttactttcaatactatatttaaaatcacttggtatttccgtcatatactttatctctctaccacgctaaagtgtaatgtgattaataacttatcatttttagcaatacattacaacctttttcagaaaattcggtgtattgattttaaaattttttaaaataaaaaaggcaagacatttgtgcctataaaaatgcttaaccaagatttttatattgaagttgtacttcttgcacatattgtccttgccttattatgtaaagttattttctttctatctttttattaaatttaactattcttcataatcccgattacctttaaagaattgtctatcttgtttactatatacattttcaggattaaaaaacggtttgagtttatatttaaattcaaataagtttagaccatcaatcgcaaccctatcttgataaacattcgttgttgatatgtctgtaaaattatttggaccaacacctgcaataaatttaaagcctgctttatcgaccaaataatcatacgctaatgtatgcctatcttgtgcaccgtgtggaaatacaaacatgtctgttttccctacaattgattcaacttcatctttccaccttttagtatcacgttgaataccctccaaagatgttttttcaaaattaatgtgaccatatgaatgactcgcaaatgaccatccatcccgtttcattgcgcgaacaacttcttcagctgcttttttattctttgtataatctttactcgttaattcattcgtccgataacctaatacgccctcataaccggttaaagcaacaacacctttttcaccatttaaagaaaaatctggatgctcttttacaaatttatttaaaattggcacgatatcattgtcatcagaataagtagcatggccttttgagtctgtcgtttcagatacaacatgcttatttttatcaagtactaagcggtcagcataaccatggtgtctcatgtaactatagtaattcatatcatcaattgagatgattagtggctttttacctttcggcaattttatttttttggcttttacatgatgagatgataagtcgtatacatcatgtggattaacgatgatgtaattatttttatataattcgttcaatgattttttaaattcacttacagtaatcatccaatcattgttgcccttagcttggtgtgtatctcctgtaaacgcaacttttgggtctgtaattaatggatgataaaacacatgataaacttggccgtgatatgtttcccaatgttcatccattttcgatttatgctttgcatactcatttggattagcagatttattttgagctttctcattttgcttggaacagctatataacaatgcaactgataataacagaaaaaatagcaataaatattttttatgcattaaacattctccctatgttttattatgcacaattataacatttttattatgtggctcataactttttaataaactgttgggattttaattttattttttagataatgtcatagtattttatttataaaacacaatatctccttgattgataatatcgtccattgtatcgtctcgcttgaaattaagcctttctgctaaatttattgaacgttggttacacttatttatgtttgaattaattgactagggtataacaatagtgtggtgttttataggtcattctttaaacgcagcacagaaaaatattcgaattcgaaataaaatgcttgcatctttgttttatgggcggtattgtatgtatatcaagtataaaaaatatatctaagagataaaaatatggaggttttatattatgacaaactttacttttgatggtgcacacagtagtttagagttccaaattaaacatttaatggtttctaaagtgaaaggttcattcgatcaatttgatgtcgctgttgaaggagatattaatgacttcagcactttaaaagctactgcaacaattattccaagctcaattaacactaaaaacgaagcacgtgataaccacttaaaatctggtgatttctttggtactgatgaatttgataaaatcacttttgtgacaaaatcaattacagaaagcaaagttgttggtgatttaacaattaaaggtatcactaacgaagaaacattcgacgttgagtttaacggcgtaagtaaaaatcctatggatggttctcaagtaacaggtattattgttactggtataatcaacagagaaaaatatggcattaactttaaccaaacacttgaaactggtggagtaatgctaggtaaagatgttaaattcgaagcatcagctgaattctcaatctcagaataacctcatctcataatcctcattgattttaatatatacgaaatgccaactatatcatctctaggtatagttggcatttttctttaatttatgattcactattttaacatttaaacttatattaagacgcccttcattcaggcaggtcttattgaaactgataacttttatgcccttttgcaaagccattaaccgtataaagcatagatcctccgtccatttctatatcattggaacaaatgatgagttgatttgtgccaggtataaattgcggatgcgtagaacgtaacatatgaccttcatcacgccctggtatcaatatttgtcctattggataaccccttttattaaatactaatactcggccttgaccatacattgccacatataaattatcgtcactatcaatacaacatgagtctggtccttcatgacctgtaaaatagtacggtatggtagctccaaatggttgtatcgtcacaccatcatcttcaagtgcaatgcgatgtaatcgattggctgttgtttctgttacccatagtactttttcatctgtacttaaagcaataccatttgctacgctaatattttgaataatcggcgtcactgttttaaagtccggcgcaacataataaacgcctcctagtgaattggtagagtatcctctaaaatctgtaaaataaaatccacctttagaatcaaataccatgtcatcaatacaatatgttgttgaaagatcttcaataatatcttgtaagttgtcaccattttctgtcgctgcaaaaataccacctgtagatttaaaatctcctaaataacaaataaataatcggccatctttatgtattttgattgctgcaggatttgctttatggcttacaaaaggccgcttaatttctttagtttctggatttactttaaaaatatttccttcgaatacatccaataaaaagagttgtccctgccgatcaaagttcaatccttctagttgcaatcctttcttggaaatttcaagccatggttcagctgtaattgtttgtaattcactttcagatataattggaacagcactgttagacttcccgctataaactaatgtaggtaaatcttgttgtgtcatcataatcattcctttcatttcattcattcgttttaactatcattttcattttaaacaaggtaactatcaaatcaaatgataacgttttcatttatctattttatcggtctagtggctgatttcaagctagaaatattgaatgacaatacaactctgttaaaatgatggacgtagacaaatatgcgtattgacgctttattttaaaaattaacatgcttataacatgtttttagaaggagattaacctatgaactatcaagttcttttatattataaatatacgacgattgatgaccctgaacagtttgctcaggatcacttagccttttgtaaagcacaccatttaaaaggtagaattcttgtttctacagaaggtattaacggcacattatctggtacaaaagaagaaaccgaacaatatatggcacatatgcatgccgatgaacgattcaaagatatggtgtttaaaattgatgaagctgaaggacatgcttttaagaaaatgcatgtacgtcctcgaaaagagattgttgctttagatttagaagaagacgtcgatccaagacacacaactggccaatatttatcacctgtagaatttagaaaagctcttgaagatgatgacacagtcattattgatgcacgtaatgattatgaatttgatttaggtcatttccgaggtgcaattcgtccaaatatcacgcgctttagagatttgcctgactggattaaagagaataaagcgttatttgcagataaaaaagtggttacgtactgtactggtggcattcgatgtgaaaaattttctggatggcttttaaaagaaggtttcgaagatgtagcgcagcttcacggcggtatagctacatatggtaaagaccctgaaacaaaaggtcaatattgggacggtaaaatgtatgtatttgatgatcgtatcagtgttgatatcaaccaagttgaaaaaacgattattggtaaggattggtttgatggcaaaccatgtgaacgctatattaattgcgccaatcctgaatgtaataagcaaatattagtttcagaagaaaatgaagccaaatatttaggtgcatgctcttatgaatgtgctaaacatgagcgtaatcgttatgttcaggcaaacaatattagtgacaacgaatggcaacaacgtttaacaaactttgatgatttacatcaacatgcttagtattaattaaatacctttcaaaacacgctttgaaaatccgatttataaaggtttttcaaggctgttttttttatgcgcatgcataacctgatatgtttttaattatgcacatgttatactaaattaaattttaatactgcggggtgtcttaaaatgcacattttagtaacagggtttgcgccttttgacaatcaagatattaattcttcttgggaagctgtgactcaactagaaaatattattggcacacatacaatcgataaattaaaactactaacctcttttaagaaagtagatactattataaataaaacgttggcatctaatcattatgatgttgtactagctataggacaagctggtggtagaaatgccattaccccagaacgtgtcgccattaatattgatgatgcacgtattccagataatgatgattttcaacctattgatcaagccattcatttagacggtgcgccagcttatttttcaaatttaccagttaaagcaatgactcaaagtattattaaccaaggacttcctggagcactttcaaatagtgcaggtacatttgtttgtaatcacatactttatcacttaggttatttacaagatacgcattaccctcaccttcgattcggatttattcatgtgccatatataccagagcaagtcgttggtaaacccgatacaccatctatgccattagaacagatagttgcaggtttgactgcagccattgaagctatttctgatgacgatgatttacgtatagctctaggcacaacgcaatagttataaatgcacaaacaaaagcaccctaatttgttagtttaagtctaactttagggtgcttttggatgattggtatacagttttactataatgatgtattttagctaaacgacattgtttagtcttctttttttaacttcctaaaatttacaaatgtataaataataaatgctatatttagaatgatgagtatacttactgaaactaaattaaaagtgtctggttctttactaaagatagatgctatccttgctatcaaacttggcaatgaaattaccaacacgatgagcgcataaattttctgtttaattaaaatacaagttccaataactaatattaaaaatgttatcccaataatgaaactctgtttgtcacttaactcaaagaaactatagataggatattttttaataatcaagccacctaaaatcatccataaaaatacgataattccataagtcacatttataacatatgttattttttggtcaccaaatcggactaatgtattgcgtagaatcagcataccaatgacaacacctaaaataacgatactagctatatacaataaaaatgcaattgtcacatcgaatgtacccaaatctaaaaacataggaattataatgactgctaaagtaaaagcgaagtacaacgtaatatatttatataaaccagtagtaagacttatctcaggtgataactgatcagccattgacttaatcggtgtattaataattgaacttgtatcttcgttatttttttcagccatagttaaatgatcttcgagctcttccaatagttcttctacttcttcttcagttttacctctaaataacaattcaacacgtaatttttctaaaaaatcttgagattgtttacttaacatcgttttcccctccaaacaagttaatcatccctttattcaaagcttgccatttcgatttaaatatttttagttcctttaaacctgagtcggtaatcgtatagtatttccgccttgggccaccattactagatttttttattgtcgtatcaacgtatccttttttgtttaaacgcattaaaactggataaatactaccctcacttatctctggaaactcttgattcttaagtttcgtcataatttcataaccatacgtttcgccttgggcaatgagacctaatatcgccccatctaagagaccttttataatctgatctgacactgacattttaatcacctactatcttacataataagatagtacattgagaacttttcgtcaactatcttatattataagttagttgttgtacacattatttaaatgactaacaactttgttaatagggtaatacttacggaagtatgttttatttatgggggaggaattaataatgactacaaaaacggtatttgatgtcattgatatgggtttaggatatttagtaaatgtgtatgatacttggaaagttgaaaaggtacttgatgattatcataagcctttttctaataccattcattggcaatttgggcatgtattaacaatttttgaatcggccttagctgttgctggtaaagagaatattgatttaaatatatatagacctttattcggaaatggttcgtctccagatgaatggaaggacgaagtacctagtattggagcgattttagaaggtcttcaaacattacctgaacgtgcacgaaaactaactgaagatgatttagcaattgaattgaaacagccaattgtcggttgtaataacttagaagagttattagtattaaatgccattcacatcccacttcatgctggtaaaattgaagagatgtctcgtatattaaaaaatttaaaataaatatgtgcttattaaccgttaacaacacgttacggatttttttattttttaaaaggccactcttagtctgcttacatacagattaaaagtgacctattaatatcatgtattatacatagaactaagaatagccttatctataaaaataattataatggtttatgagttaaatctttttcttaaaattaaatacagtcccaatatacctataaatacccatgtaatccatgaagttataatcttcataccagtttttggtaattcttttagaggattttcaggtttggttttattatctttaggttgatcatccttatccacttttgatggcttatctgggggagttggtttaactttattagaatgatcaggtttagttggtggtgttttgtcttttggtttttcaggatagattggtttattcggtttttctggcgtatatttattcgtcacaatcaagttgcccatatcattgttatccacatgtgttgtataacctttgacctttgttaattcctcgactgtgtattttacttgttgtccttttgctttttcatctaatcctgtccacgtatgggtccagttattagattcatttaatgttgccgtttttcctgttgcttttccatcttgatataactcaactttgatttcagttggtcgttttccgtcttggttattattgtcatcccaattttttgttactgttgccgatgtctctcctggtgtatacttgttcgttattatcgtaccgttgatgtctgttgtgtagtcttttacgtgatcttcggtcactgtatattctattttctttccttcatcatacttcggtaagtttttaaattcatacttccagtttgtttcagatgtcacgtctaacgtttttactttctctccgttagccaataaattcacactgactttttctggtctcttaccatcttgattgtctttgtcgtcccaaactttttcaccgctaattgatgttgtttctggcgtatatttattcgtcacaatcaagttacccatatcattgttatccacatgcgttgtatagccattaacttttgttaattcctcgactgtgtattttacttgttgaccttttgctttttcatctaatcctgtccacgtatgggtccagttattagattcatttaatgttgccgtttttcctgttgcttttccatcttgatataactcaactttgatttcagttggtcgttttccgtcttggttattattgtcatcccaattttttgttactgttgccgatgtctctcctggtgtgtacttgttcgttattgtcgtaccgttgatgtctgttgtgtagtcttttacgtgatcttcggtcactgtatattctattttctttccttcatcatacttcggtaagtttttaaattcgtacttccagtttgtttcagatgtcacgtctaacgtttttactttctctccgttagccaataaattcacactgactttttctggtctcttaccatcttgattgtctttgtcgtcccatactttttcaccactaattgatgttgtttcgattggtttttcagtattagtaaccactaaaccattttcttttttagtatatccttctggtgttgcatcttcaccttgagcatttacttctttaaccaaatatttaatagtcttgccatttttgtcattttctggaagattagaccatgtcacttttgtcgttccatcttctaattttttaatctctgctttgtctactggtgttgtgttttgattgtcatcttgtttgtacaacttgaaataaatcgttggtttcactttttgagtgccttcccaaaccttttgagcagaaacatcttttgttttttctatctcttttgcattttcaatagtcgtaaaatatccctgattatctgtatctttcatagtaaacggatattctttatccttatcaaatatatacggtgctggcgcctctatttcttttaaaatatagtctccgctaggcaacgctttaatattagcaataccgtttgcatctgttttaatctcaatttctttttgattgtcctttacaactgatccatcttttttagaaagtttaaattttacattagctataggagctttggtatctttatcctgttttaaaacttttaattcaccttttacagtaccttcaataccggcattagcattaatattgtgcacagtatgattaaatgattttccgttcacttcttccttaccatgctcttgataccaagcttgtgaattattaacaaactctttttgctgttcattcgtaattttggttttgtagttaattgaaaaactattaagtgacccatagccttgtggaattgttacatcaattgtgttcttcgtattatcaacagttattttagaacctggaaaggctttttcaaaatcagtaattgcatttggtccactataataatcgctatgtgtacctgtcacattaatgtttaatgtgcttaaatctaactgctgtccaccttgaatctgatcctttatagtaatatctttcgatacataacttttttcattgttaatatttaaaaaccatcgtacatgtgtcgtatcttctggtagcatatctcccgttttataatagaaaacactacttgttcccgcttcacttttatgaaccgtaacattcgttgatttattcccagatgttatcgtagctactttgtcatctgaagtatttgtttgcgttaaatttcttccttgtacttcaaattctgcaaatcccgaaacatcacttaatttttctactttatcattgaatgtaattgttgcaccgtctggtgtaataactgcttgacccacctgttcacctttaacagttaatggtactgttttactataaccctctatctttactgtaccgcttgtcggccatgccactttaatcgtgtcaccattttgtatttttccatttttatcgtcgaacgtcatttttactgtcgttttaccaccatcttctatcttagacggtgatacagttaaatctgtaacattcgttgatgaaatatctcgtgctgcaaatgcttcatttttattaaataaaggtgtgatgatatttaataacattataaagaccataaacttcaacacatttttgttcataaaaacccctccttatactctatgtcatatccacaggatactaataataaattataaactaatttagttcttattcaatgaaatttatcaaaaattcatattattattttattatgcaaaatatatacagtataacgaatacaagtgcatgaagttaacttgtatcaattaatttcttagtatattagttcattttcaaaatcttttaaatttaataaacaccaactataccagttcttcaccgcttctcgaaaaataattatattaatgatttcgttaatttaattttatatttaattattactgtacatcttttgtagttagctttattcttaaattgaaatatgtataaaacatagaaagaaggacgttttaacatgaaaaacacggttaaatatcgtaagtttatactccctatcgttgtaggtctccttatttgggcacttacacctattaaaccggaagctgtggatccaacagcatggtatatgttcgcaatattcgtcgcgacaatcattgcttgtattacacaaccgatgccaatcggggctgtctctataattggatttacaatcatggtgctcgttggcattgttgacatgaaaacggctgtcgctggttttggtaataatagtatatggttaattgctatggcatttttcatttcgagaggatttgtgaaaacaggtcttggtagacgtatcgcacttcatttcgtcaaattatttggtaaaaaaacattaggcttagcatattctatcgtcggtgtagatttaattctagcgcctgctacaccaagtaataccgcgcgtgcgggtggaatcatgttcccaattatcaaatcactttctgaatcatttggttcgaaaccgaaagacgaatcagcacgcaaaatgggtgcatttcttgttttcacagaattccaaggtaacttaattactgctgctatgtttttaactgcaatggccggtaatccccttgcacaaaatttagcatctagcacatctaatgttcacattacatggatgaattggttcttagctgctttagttcctggacttgtttccttaattgttgtaccttttatcatttataaaatttatccaccaactgttaaagaaacacctaatgctaaaagttgggctgaaaatgaattagcgactatgggtaaaatcgctttagctgaaaaatttatgattggtatttttgtcattgctctaacactatggattgtcggaagtttcattcatattgatgcaactttaacggcctttattgcgctagcattgttattattgacaggcgtcttaacatggcaagacattttaaacgaaacaggtgcttggaacacattagtatggttctcagtgttagtgttaatggccgcccaattaaacaaacttggttttattccttggttaagtaaatctattgctacaagtcttggtggcttaagctggcctatagtactggtcattttaatattgttctacttctattcacattacttatttgcaagttctacagcacatatcagtgcgatgtatgcagcattactaggcgttgccatcgcagccggtgcaccaccattattcagtgcattaatgttaggtttctttggtaacctattagcttcaacaacacactatagtagtggtccagcgccgattctattctcttcaggttacgtgactcaaaaacgttggtggacaatgaacttaatattaggtttcgtctactttattatctggattggtttaggatcactttggatgaaagtaattggtatattttaaaatgtttaaattagggagtgggacagaaatgatattttcgcaaaatttatttcgtcgtcccaccccggcaaggttgactagaattgaaaaaagcttgttacaagcgcattttcgttcagtcaactactgccaatataacatcgtagagcatagaacattgatttatgtcccagcctgtttttaatttgtatttaaaatcaatctttgctaaatcaagactccctttttaaaatacattcatacttcaaatcatttgcatgcttcactaaaaatctatataacgctttaaatcattgtgtaacatcacagaaaatacatttctgtataaacgcacttcgttgattaacattacttatgccctcataaatcacaaaataaaaaacaccttcgtttaaattcatttaattatgaattcaaagaaagtgctttattttatatttaatgtttcaaatttatacggctgtcactattactgcacacatacctcagtctcaccttaacatgacacaaaggaagttgaaaacacgtataattatctctcctcgcattttatagggtttttgcgaccggatgtttcttcaatttaatgtattgagaaagactatataacacaatacctgtccaaataaatataaacgtaattaattgatctatactaaaaggctctttgaaaacaaatataccgagtacaaacattattgttggtccaacgtattgaataaatcctattagcgaaagtggaatacgttttgccccggctgagaataggattagtggtattgccgtaatagcaccagaaaataacaaccaaaatgatgacatgttcaatccaaatgacatctgatgttgctgccataaataaataacgtatattagtccagcaggtgcggtaacaatacattcaatcgtaatactgctgatggcatcaatatgtactattttttttaataatccgtatgtaccaaaggataacgctaatataatagagacgattgggaattctccaattttcagtgtcatatataatacaccaatgaatgcgaataatatggctagccattcaaatttattgaatctttcttttaaaaagataagtgcgagcaaaatgctaacaagtggatttatataataacctaaacttgtttgtagtacgtgaccgttcgttacagcccaaataaatgtaccccaatttaatgtaatgacatagcctgctacgacaattgctagtaattgaatgggcttggctaacaattgattcatatctcgttgaaatgcattgcgttgtttttgtccaaccgcgagtatgaaaatcatgaatattactgaaaatataatacgaaaggctaaaatttcaaatgcgcctattgcatcaacgaactgccaatatataggtagtatgccccaaagaatgtaagcactaagtgataaaaatataccttttttatattctgtattcacttacatacctccttactctcccaaatttttaacatgttacgctcacttagttaagctaatataacgattttactaataatatttcgataaagatatcattttgtttatattttccacatttattcgctaaccactaaataatattaattttataaataattctgtataaatcagggtatattgccagaaagactaccaaacaacataaaggatggatacaaatgactttacctaaaattggaaagcctgcaacacgtgcgctaaattcacaaggtatatacacattagaagatgtatcacaatatacaaagtcatctctaatggagatgcatggcgtaggtcccaaagctatatcaatattggaaaatgctttatttcagcaccaactacattttaaaacggaagttcattcatcattaccttttttattaacaggagatgtctcatgcaatcatgcgcctaaacgtcaacaaatgatagattttatagttgctacagcagcattagatattgaattattacgttcactggttacaacagaatttatttggtctgtccctggccgctttgacatatacggacctcaaatattaattcaagaactatctaatcattataaagagattgcttctctcaatattcaatccatcatcacacatgggagcttaggttccatgcacggtagtcaaatattaaaaactggtacagtgattcattttgctcatttttttgaatttgaaaatcataaaaaggatgccaagttaagcaaagtgacatcttacattgttgttggttaatgactcataatctataacgctaaaaactatcgtaattacatatatattaataatacaaataattttgcataatatttttgttatatgaatacttttactagagtgcacattgaacatacagtatgattaaatatcatgttatgaaagaaggatatattttgactgtttttaaaaatgagcgcttaagctggttaccatacatagctattgtcattttgttacacgttattgggtttagttttttatggattgctggaaaagaccatcatatcttatttggtatggggattcttgcatatacattaggtttacgtcatgcatttgatgctgatcatatcgccgcaatagataatacggttcgcaaattattacagcaacggaaagatccatctggtgttggtttctacttttcaattggacattcatctgttgtatttttaatggctgtttttttaggggtatctgtaaaatgggctaaagatgaattaccacatttccaagatattggtggaacgattggtacactagtttcaggtttctttttagtgcttatcggtgtgttgaatctaattattttaatctctttaattaacttgttcgctaaattacgtcgtgaacacattgaagaagctgaagtcgatgcattacttgaatctcgaggatttgtttctcgatttgtaggaccttatttcaaattaatcacgcgtagttggcacgtattgccacttggctttttatttggacttggttttgatacagctagtgaaattgcgttacttgctctttcttcaggcgcgtcacaacaagccatttcatttatcggaatcttatctttaccaattttattcgcatcaggtatgagtttgttggatactttagatggtgttgtaatgaaatatgcctataattgggcattcttcaatcctattcgcaaaatctattacaatataacgattactgcgatatccgtcatagctgcattagtgattgggatgattgaattgctgcaaattcttgctgataagctagacttacacggtgcattttgggcatttattagttcaatcgaatttaattatttaggctatattctagtcgctttatttttaataacttggcttatttcaagcttaatttggaagtttggtcgcatagaacacaaatggtctaaataaagtagcttgtcttgcaatcatctttttattattgcgtttttagacaccctgcatactgcctcctttaggatacgctctctattgtcatattttgaatcttacttttaaagatgacagcattgagagcgtatttttctatctaaaatacatcttgtaaaatccagtgctttcttatttaaaattttatcatttctgtttacaattctcttatagtctttaatacaggaggcggtatactaatgaatattgcaaagttagaagattatctacaaattgaaccaactcgttatgatcaaccgagtattgaagcattaaattattatgcgactcgctttatgttaacggtgcctttcgaaaatattgatgttcaaaatggtaaaccaatatctgtagatatcgatgcacttttcaataaaattgttcatgacaaacgtggtggcttttgttatgaattaaacacatttttcaaagcatatttacaacaaaaaggatttaacccagaattaatgtcggctaccattcatacacccggtggcggtcgtagtcaaaacggttcacatgcatcacttgttgtttctattaataatgtcttttatgtaaccgatgtcggctttggagacttacctctaaatgccataccaattactttaccagatgatacacagccgattactgatatcagtggtacattccgcgctattttcaacagtgaggataaggacattttctatgttcaaaaatatgaaaataatcattggcatacaaaatacgaagctgaattcaaggctagacaaatagaagaattcgatcaaaacattgaatataatcaaacacatcctgattcagtatttgtaaaacatttattaattacaatgccacaatcatttggacgtgctacaatgtctgaaaaccatttaactttaacaaaagatggaacgccagaaaagttagctatcacaaaagataactataaacaatttttaacaacatactttggactaaatgtaacaattagtcgacttgaaaacagcgacaattaatcataaaaatacggacgtaacttactttaatgtaggtaacgtcctttttaaatacacatgttcgttaggatgtgggacaaaaatgatacagcgccactaacaattaatgatttagtggttctcacacattagccagagctcatgtgtacttataaatagacattcatgcgtaaaacgcatgcataaaaaatactagtttctaaagataaaatatttctttattgacactctgtgcaaacacaacaaaaaggatatggcacaaacttcatgccacacccttcttttgaaccgcttcattttacttaagcaagtgcatctacaacataaatgacacctacgaatacaaatgcaatagcaatcatcgtcgaaataaagacgatacccattaatggattaaataataaaatgacaccgaaaacaatacctaataaattaaaaatcactgaaattagttttaagctaccactacctgaaaacgtaaataatccagcaatagaactaaaaataaaccaaaatgcaaacatgtagataaaaaatgccgagctagcaccaacattaaaaatgacaataagaccaaatagaatatctacaatccccataaacagaatccaattttggttaccaccaactaaagctttggcttttctacgataaacaatttgaatcacaccattaatcaatacaaataatccaattaaccatgtgattgcataaaagttttcaattgggaatgtaaaaataacaactgctaacattaataacaacacacccataatcaaactagaccatttaatgccttgatttcctttttccataacaatcatttcctttcaaacaacgccctctttatattttcattagtggcactattattcattgtttaaattccctcatcttaacttatagaaacatttcctcagtgcaaatactgtgatgctcaaattagttgaactgctttccaataatcgaaattcacccgagaaaatcacgatatattaatatctttcaactatgtaagattcaaacattgaattgtaagtttagataaaggctactgttctacttattatttaaaatgaaattaaatacaaaaggagtgatactatgacgatattatcagtgcaacatgtttcaaaaacatacggtaaaaagcacacatttcaagcacttaaagatattaactttgacatacaaaaaggcgaattcgttgcgattatggggccttctggatcaggtaagacaaccttattaaatgtactaagttcaattgaccaaatttctagcggtagcgtgattgctaacggacaagagcttaataaacttaatcaaaaagcacttgccaaattccgtaaagaatcattaggtttcatcttccaagattacagtattctgccgacattaactgttaaagaaaacattatgttacctttatctgttcaaaaaatgtcgaaagcaacaatggaagaaaattataaagcgattacgacagcattaggtatttatgacctgggaaataaataccctagcgaattatctggtggtcaacaacaaagaactgcagcagcgagagcatttgttcacaaaccacaaatcatatttgcagatgagccaacaggcgcactcgactcgaaaagtgcaaatgatttattacaacgtttggaagaaatgaataaatcgtttgataccacaattgtcatggttacacatgatccggttgcagcaagttttgcagaacgtgtcatcatgctaaaagatggccaaattcatacacaactttatcaggaaggacgttctaaacaggccttttatgaagacattgtacatcttcaatcagtattaggtggtgtctcaaatgacatttaaccatatcgttttaaaaaacttacgtcaaaacttaaaacattatgcaatgtatttattttcattattttttagcatcgtcttatatttcagttttacaaccttacagtttactaaaggtgtaaataatgacgactcgatggctatcattaagaaaggtgctttagtcggatcaatatttttatttatcattattgtcatctttttaatgtatgccaatcatttattcgtgaaacgtcgtacacgtgaatttgcgctatttcagttgattggtttaacacgacaaaacattttgaaaatgttagcacttgaacaaatgattgtatttttaatcacaggtgttgtcggtgtattatgtggcattgcaggtgcacaattattgctttccattgtatctaaattgatgtcgttatcgattaacttatcgatacatttcgaacctatggcccttgttttaactattttcatgctagttattgcgtatatactgattctatttcaaagtagtttatttttaaaaagacgcagtatcttatcaatgatgaaagactcaattaagactgatgttacaactgcgaaagttacagttatagaagtcatttcaggcgtattaggtattgctatgattgcactaggatattatatggcgacagaaatgtttggtacgttcaaagcactaactatggctatgacatcaccgtttatcattttatttttaacggttgtaggcgcctatttattcttcagaagttccgtgtcactgatttttaaaactttgaaaaaatctaaaaatggacgcgtatctattacagatgttgtatttacatcgtctattatgtaccgaatgaagaaaaatgccatgtctttaactatcattgcaattatttctgcagttacagtaactgtattgtgtttcgcagcgttatctaaatcaaataccgatcaaacccttacatctatggcacccaatgattttaacgtcgtcaccgctcaagacgcgcaacaatttgaatctaaactaagccaacaacaaattacattttctaaaaatgcttacgaaactattaatgtagataatgttaaagatcaggttattactttggaaaatggtagtgattcaggtcgcacgaattcaatattaagtgcaaataacaagttaacaggcaacaatgccatcattacaaatacaaaatcgctgcctaacgtgattaatattcatttaaacaaagatttagtagtaaaaggttcaaagaacgagactttccgtgttacacaagaagacaaagacaaggtttatcctttaaatctaagctttaattcacctgtcattgaagtaagtccagaaaagtatcagcaattgaaaacacaaaataatgttcatactttttatggatatgatattaaacaaacatcacaaaagaaaaaagctcaagcaattgcaaaacagtttggagacaaaatcatcacttatgatgacatgaaaaaagaggtcgatgctactaacggtattctaatattcgttacatcatttttaggattagcatttctagtagcagctggatgtattatttatattaaacaaatggatgaaactgaggatgaactaagtaacttcagaatattaaaacgcataggctttacgcatacagatatgcttaagggattattattaaaaattactttcaacttcggtttaccattattgattgctatattacatgcagtattcgccgcaatagcatttatgaaattgatgggtaatatatccttcatgccggttattatagtaatcattgtatacacactcatttacattgtttttgctttaattgcttttgtacattcaaataaattgattaagaaaaccatttaacacttgtgattaaaagatgcttcattgagattttgattttaagcaatgcagtataactattaactaatttataaaaaggagagattgaatcatgaaatttagagaattagtaaaacaatcatacgaggatttgaaaaatttgactgtaacttggtataacgttattgctttagcaatgattgttattgtcttaagcgccgttacaacaccaatgataggtattccagctggtttattaggtggcgcttattatttaaaacgccgcgaagaaaaaggtaaataaacgtattccatcagtatattacattgctatgacctttcatgtcagattttaatatcaacaagtagcgtttatcgctgcttgttttttatgaattgcttataaaatcgtcatgtttaaacgttatgtcactttgaaaactagcaaacaccataaaagactacaattttttatttttataaacccctttaaatcaacgtttctaaggtttttaaaaatcttttttaatttattttcaaaaaacactgtacattatgccaatatgagcgtatagttggtcttacgtaataaaagctcgtgaattaaattgtagtgtatttgtttagaatatcctcttttttagttatgaatttgttacaaatattaagtgcaaaagcacacggaggttttctatatgaataacggtacagtaaaatggtttaacgcagaaaaaggttttggtttcatcgaacaagaaaatggcggagacgtattcgtacatttctcaggtatcgctagcgatggctacaaaactttagaagaaggtcaaaaagttactttcgaaatcactgaaggtcaacgtggagaccaagcagttaacgtacaaactgtttaatcttacaaaataaaacgactcattataaatgaatcgctttgattaccaacaaggttctaaatcttgttggtatttttttatgctattttggataatatgagacgatacgatgatgatttataaaaacttatttgccagatacacactaaggaaaattatgaggctgagtgtaccaactactgatataatagaaagcgcatttgtcatcgtatttctagctttagtcgtttgtacttcactaggatcttttccattcataaaagcaacaattcgatcgtagttgtccattttatgcacttcttttaaatcttctattttcatagatgcataaaaacctattcccataatgattgccaccgttataccccaagtccaattccaataaacaactaaaggtcccattaaaattgcagctaatgtcatgaaaataagcatcacatatgtccataagttaagacttcgttgcgctttaatatcaggtacaaatggaatagtcccttttactaaatcatctaaagttacattgaacaattcgcacatcattaataagttatgtatgtctggtaagcttttgtcattttcccaattagaaatactctgcctagatacatataacttttcagcaagatattcttgtgaataaccatctcgttccctatactttttaatttgtttactcagattcaattacatacgcctccattcaattagtacaatcattacaatcagactatcagataaagttaaatcaagtcacctgtatgattgactaaatgttttgacatacgacaacataagggttcgaagactcccttaagacaaacttgtatgattacgcgcttgtaattttctcaatgccaacttgaatttcacttattaatgatgccacttttccatgctattcaatgcttgcgaagttagtcctatttaagagattacgttcacactatttactattcgattttccagctttccaactatgcttttctaatcttttttgtgctataaattctaccgcttcaaaaatacatacggcactgatgaaccagcttaggaaaccaacaataatgctaatcaaccacatgtgcgtcatatgtaacatcatccatgtaactaaaatacaaactaatacccctgtcataccaaatactgcgccacgacttacatgcacagcgactttatcaccatattgcatacctgtaataaacatagacactaaaaatactgccggaaacgttgcaaatataccgccaaattctttccaaggtagtgttacagatacaatataacttaataatactgcaaatccccccacaaaaaatttcattaatgttaatttcatgatgttctgcctccaataatttattacttaataactgaatacaactaattatcacgtattttccaaactataaatgtctaatactgaatattgcgagggaaataacaaaccaacaaacaactgtgaatattgcgcctttccgataacctttatgcttaatgtagagagatgtcaaaaatacagttaatatacaagacagaataccgacaattgctccagtactaagattcatcgacatctccactaattgcgtaccacgatgatccaaagctaatgcgataatagccgcaagaaagactgccggcatagtagctataatacctcctaacttaccacctaccttatcagcaataattgaagctaatgcaacagcgataccaccaatgacaaaatgaagaattgcacttccaattgaaaacatcttcaacgtacctttctataattaattcaatacaaaacgtatcattcacacaaagtgtaaaacttaaattttctactgtaaaggcaactcaagcgatgttcataaagctttcatgatactttcataaactagcaataaagggttcaaataaaggtatatccatctcaaattattgaaaattaccattaactgtaattttcaaatcaacatataaatataaatttttatgtttcacgtaaaacaaaaaagacaaagctgttatgatcttagctttgtcttttatgtgttagtcatcatgtatacgacatcctactactaacgtttatatattcgaatttttatttcataataatcttcatgatctttgtctttatgctcaacatgtaatcctgtttgttgaatcgcttggatacttttgcctacctcatctcgtgcttgagtgacatcttgtgcaaagcgaaggttttgtgctttgactttttcgggccccgttttttggcgtactctatcttcagtctgtttcacatttagtttttgtgcaatgacttgctcaatcaacgcttcttgttcgctatcagacaatgataataccgctctcgcatggcgctcagtaattttaccttctcttaagcgaagtagtactttcggcgccaacttcaataaacgcaacttatttgcaataaagctttgacttttacctaaactttttgccaattcactttgcgttgtatcaccaatttccaataatttcttataggcttccgcttcttcaacaacagacaaattttctctttgaatattctcaattaatgccacaacagccgtctcttcatcatccatatcacgaataataacgtctgcttgaggtaaatttagtgattgtattgctctaaatcggcgctctccagcaataatttcaaacatatcttcttcaatcggtcttacaacaataggctgtaataagccatgttcatgtattgattcagcaagttctttaattttatttggttcaaacacctgtcttggttgataacggttgggaacgatacgttcaatttgaatggattcaacattactattgcgatcttcttcaatatgtccaaggatgtcatctttgtttttcaaaccaaataattttgaaaaaggttttttcattatccattcgctccttttatgttagttgtaaaggattatgcattatttttcaagtaaaggagtcttattaggcgtccctggttttcttggatactttttcggcgtctgtctttttttatcaataatgaacatctggcgctctccagcatcttctggcaattcaaaggtatgtgtttctgtaacgttaccacctaacacactaattgcaaattttgcttcttctaattcttcttcaccttttgaagattttaatgcaacaaactgtccaccttttttaactagcggtaaacacaattcactcaacacggataatctagctactgctcttgcagtaacaacatcataagactccctgtagacacccttaccaaatgtttctgctctatcgtgtataaagctgacatcctgtaattgtaattctgacgctaaatggtttaaaaattgaatacgcttatttaatgaatcaacaatcgtcacttttaactgcggaaacattatttttaacggaatacttggaaaaccagctccagcgcctacatcacatatacttataggctgattaaaatcaaaataaaaactaggtgcaatggaatcataaaaatgtttcaaatatacatcgtgttcatctgtaatacttgtcaaattcatcttttcattccattcaacaagtaaacgataatatgtttgaaactgatgtttttgagtctcagttaattcaatattatgttcttttaattgttctgctaaccattctacagtcattagtcactcaccctttggagtttaccttgttctaagtaaatcaataatatagatatgtctgctggatttacccctgatattctagaagcttgtgcaatatttaaaggttttacttctgataatttttctcgcgcttcagtcgccaaactatcaatcttactataatctaagtcttctggaattttcttctcttccatacgtttaactttctcaacttgttgtagtgatttattgatataaccttcatattttgtttgtatttctacttgttcttcaacatccgcattcaattgatgttcttcttctaaaatttctaaaattatatcgtaagtcatttcaggtctgcgtaataaatcgatagctaaaataccatcttttaagcgagaaccaccatgttgttcaataatcgcttgcgtatgttcgtttggtttaatacgaatatctgataaacgcttaatttccgcatcaatttgctgacgtttttcattaaaacgtgcatatcgttcttcagaaatcataccaagttcatatcccatatccgtcaatctcaaatcagcattatcatgacgtagtaacaaacgatattctgcacgtgatgttagtaaacgataaggttcattagtacctttagttacaagatcatcgattaatacaccaatatatgcatctgaacgacttaatatcttctcgcctgtgtttaacactttacctgcagcgttaatacctgccatcaatccttgtcctgctgcttcttcataaccagatgtaccattaatttgacctgcagtgtataagtttttaatcattttcgtttcaagtgtaggccataactgcgttggcacaattgcatcatattcaattgcatagccggcacgcatcatatctgctttttcaagacctggtatcgtctctaacatttgacgttgcacatgttcaggaagacttgtagacaatccttgcacatatacttcatttgtattacgaccttcaggctctaagaaaagttgatgtcgcggcttatcattaaatcgaacaaatttatcttcaattgaagggcaataacgtggcccggttcctttaatcatccctgaatacattgcagatagatgtaaattatcatcgataactttgtgtgtttcagcattagtatacgttagccaacatggcaattgatctaatatatattctgttgtttcaaagctgaatgcacgacctacatcgtcacctggttgtatttcagtcttcgaatagtcaattgtttttgaatttacacgcggtggtgtacctgttttaaaacgaacaatttcaaaaccaagttctcttaaattgtctgataatgtgattgatggtaattggtgatttggtccacttgaatacttcatattacctaaaatgatttcaccacgtaaaaatgttcccgttgtaataattactgctttagataaatactctgtaccaatatttgtacgtacacctttaacttcattatcttctataataagttcgtctaccataccttgcattatatgcaaattttcttcatcttcaatcacgcgtttcatttcttgttgataaagtactttatctgcttgcgctcttagtgctcttacagcaggtcctttaccagtatttaacattctcatttgaatgtgtgttttatcgattgtttttgccatttgtccacctaaagcatcaatttcacgaacaacgatacctttagctggtccacctacagatgggttacatggcataaatgcaatattatctaaatttattgttagcattaatgttttagcaccacgtcttgcagatgctaaacctgcttctacacctgcatgtcccgcacctataacgattacatcatattcttgaaccacaatataaacctccttatttgatatcttactagccttcttaagacggtattccgtctattacaattactatttacctaagcagaattgactgaataactgatcgatgagttcatcacttgcagtctcaccaataatttctcctaatatttcccaagttctagttaaatcgatttgtaccatatccataggcacaccagattctgctgcatcaatcgcatcttgtatcgtttgtcttgcttgttttaataatgaaatatgtcttgaattagaaacataagtcatatcttgattttgtacttctccaccaaagaacaaatctcgaatttgtatttctaattcatcaataccttcttgttttaacattgaagtttgaattaatggcgtatcacctatcatatctttaacttcattaatatctatattttgctctaaatccattttattaacaattacgattacatcttcatttttaaccacttcatataatgtgtaatcttcttgagtcaatgcttcgttattgtttaatacaaataaaattaagtccgcttgactaagagcctttctagagcgttcaacaccaatcttctctactatatcttctgtctcacgtataccagcagtatcaactaatcttaatggcacgccacgaacattgacgtactcttctaagacatctctagtcgtacctgctacctcagttacaatcgctttattatcttgtattaaattatttaacatcgatgatttacctacgtttggtttaccaacaataactgtagataaaccttcacgcataattttaccctgcgcaccggtatctaataaacgattaatttcctgtttgatttctttagactgctctaaaagaaattcagtagtcgcatcttcaacatcatcgtattcaggataatcaatattcacttccacttgagcgagtatctctaatatagattgacgttgttttttgattaagtcacttagacgaccttcaatttgattcatcgcaactttagaagctctatctgttttcgagcgaataaagtccataactgcttcagcttgagataaatcaatacgaccatttaaaaaggcacgttttgtaaattcacctggctcagccattctagcgccatatgtcatagttagttccagcactctattaatcgttaaaataccaccatgacaattaatttctataatatcttcgcgtgtaaatgtttttggtgctcttaacacagacaccataacttcttcaaccacttctttagactctggatcaataatatgaccgtaattaatcgtatgtgatggaacatcatttaaaagatgttttcctttatataatttgtcagcaatttcaacggcttgcggtccagacaatcgaacaattccaattgccccttcacccattggtgttgaaatactcgtaattgtatctaaatccatattactactcgcctccttcaacgatgtgaatacattttaaaataagttattatatccctggggttagtcttacgcttgtctgaggtaagacttcggggtgtattgagtggttaatgttttcctccctttcccctaccctattcttacttaatctttttattaaaaactttggcaattttaagtacgtgctcaagactattctgtatttgtaaagtcgtcatatctttagctggctgtcttgctattacaataatatctttggccaatatatgcgacttatgtactttgaaattttcacgtattgctcttttaatcttgtttcttaacactgcattacctagttttttagaaacactaatacctaagcgaaaatggtctatttctttattattacaagtgtatacaacaaattgtctgttggctacagaatgaccttttttatatattctctgaaaatctgcattctttttaattcggtaagctttttccaataacatcactcgcttatttatcgtttttatttgaagctatatttaaacttctattgagcttataacataaatttctatttattcttaatttaaacgaaaaaaaagatcactgatgagtcagtgatcttatgcagataaaactttacggcctttacgacgacggcgcgctaaaactttacggccattttttgtgctcatgcgttttctgaaaccatgaactttactatgtttacgtttatttggttgataagtacgttttaccatgcaaaacacctccatctttatacagttatctaatataccagattatgcagactctgatcactttaatagataagattttgcgtttcttagattaaaattctcgtattcgctcattgattatctagtcataattcaagcaactactacaatataacaaaatcctttttataacgcaagttcattttatactactgctcaatttttttactttta
